(19) United States
(12) Patent Application Publication
(10) Pub. No.: US 2021/0301348 A1
(43) Pub. Date: Sep. 30, 2021

(54) EPIGENOMIC PROFILING REVEALS THE SOMATIC PROMOTER LANDSCAPE OF PRIMARY GASTRIC ADENOCARCINOMA

(71) Applicant: AGENCY FOR SCIENCE, TECHNOLOGY AND RESEARCH, Singapore (SG)

(72) Inventors: Patrick TAN, Singapore (SG); Aditi QAMRA, Singapore (SG); Manjie XING, Singapore (SG); Wen Fong OOI, Singapore (SG)

(21) Appl. No.: 15/999,597

(22) PCT Filed: Feb. 16, 2017
(86) PCT No.: PCT/SG2017/050072

§ 371 Date: Aug. 16, 2018

(30) Foreign Application Priority Data
Feb. 16, 2016 (SG) 10201601142V

(51) Int. Cl. C12Q 1/6886

(52) U.S. Cl. CPC C12Q 1/6886; C12Q 2600/154; C12Q 2600/118

(57) ABSTRACT

The present invention relates to a method for determining the presence or absence of at least one promoter in a cancerous biological sample relative to a non-cancerous biological sample. The present invention also relates to a method for determining the prognosis of cancer in a subject, a method for modulating the activity of at least one cancer-associated promoter in a cell, a method for modulating the immune response of a subject to cancer, a method for determining the presence of at least one cancer-associated promoter in a cancerous biological sample relative to a non-cancerous biological sample and a biomarker for detecting cancer in a subject.

### CROSS-REFERENCE TO RELATED APPLICATIONS

[0001] This application claims the benefit of priority of Singapore application No. 10201601142V, filed 16 Feb. 2016, the contents of it being hereby incorporated by reference in its entirety for all purposes.

### FIELD OF THE INVENTION

[0002] The invention relates to a method for determining the presence or absence of at least one promoter in a cancerous biological sample relative to a non-cancerous biological sample.

### BACKGROUND OF THE INVENTION

[0003] Gastric cancer (GC) is the third leading cause of global cancer mortality with high prevalence in many East Asian countries. GC patients often present with late-stage disease, and clinical management remains challenging as exemplified by several recent negative Phase II and Phase III clinical trials. At the molecular level, studies have identified characteristic gene mutations, copy number alterations, gene fusions, and transcriptional patterns in GC. However, few of these have been clinically translated into targeted therapies, with the exception of HER2-positive GC and traztuzumab. There is thus a strong need for additional and more comprehensive explorations of GC, as these may highlight new biomarkers for disease detection, predicting patient prognosis or responses to therapy, as well as new therapeutic modalities.

[0004] Promoter elements are cis-regulatory elements which function to link gene transcription initiation to upstream regulatory stimuli, integrating inputs from diverse signaling pathways. Promoters represent an important reservoir of biological, functional, and regulatory diversity, as current estimates suggest that 30-50% of genes in the human genome are associated with multiple promoters, which can be selectively activated as a function of developmental lineage and cellular state. Differential usage of alternative promoters causes the generation of distinct 5′ untranslated regions (5′ UTRs) and first exons in transcripts, which in turn can influence mRNA expression levels, translational efficiencies, and generation of different protein isoforms through gain and loss of 5′ coding domains. To date, promoter alterations in cancer have been largely studied on a gene-by-gene basis, and very little is known about the global extent of promoter-level diversity in GC and other solid malignancies.

[0005] Accordingly, there is a need for a method of profiling promoter elements in cancer.

### SUMMARY

[0006] In one aspect there is provided a method for determining the presence or absence of at least one promoter in a cancerous biological sample relative to a non-cancerous biological sample, comprising: contacting the cancerous biological sample with at least one antibody specific for histone modifications H3K4me3 and H3K4me1; isolating nucleic acid from the cancerous biological sample having a signal ratio of H3K4me3 relative to H3K4me1 greater than 1, wherein the isolated nucleic acid comprises at least one region specific to said histone modifications; detecting a signal intensity of H3K4me3 in the isolated nucleic acid; and determining the presence or absence of at least one promoter in the cancerous biological sample based on the change in the signal intensity of H3K4me3 relative to the signal intensity of H3K4me3 in a non-cancerous biological sample.

[0007] In another aspect there is provided a method for determining the prognosis of cancer in a subject, comprising, contacting a cancerous biological sample obtained from the subject with at least one antibody specific for histone modification H3K4me3 and H3K4me1; isolating nucleic acid from the cancerous biological sample having a signal ratio of H3K4me3 relative to H3K4me1 greater than 1, wherein the isolated nucleic acid comprises at least one region specific to said histone modifications; detecting a signal intensity of H3K4me3 in the isolated nucleic acid; and determining the presence or absence of at least one cancer-associated promoter in the cancerous biological sample based on the change in the signal intensity of H3K4me3 relative to the signal intensity of H3K4me3 in a reference nucleic acid sequence, wherein the presence or absence of the at least one cancer-associated promoter in the cancerous biological sample is indicative of the prognosis of the cancer in the subject.

[0008] In another aspect there is provided a biomarker for detecting cancer in a subject, the biomarker comprising at least one promoter having a change in signal intensity of H3K4me3 in a cancerous biological sample relative to a non-cancerous biological sample.

[0009] In another aspect there is provided a method for modulating the activity of at least one cancer-associated promoter in a cell, comprising administering an inhibitor of EZH2 to the cell.

[0010] In another aspect there is provided a method for modulating the immune response of a subject to cancer, comprising administering to the subject an inhibitor of EZH2, wherein the EZH2 is associated with at least one cancer-associated promoter in the subject.

[0011] In another aspect there is provided a method for determining the presence or absence of at least one cancer-associated promoter in a cancerous biological sample relative to a non-cancerous biological sample, comprising: contacting the cancerous biological sample with at least one antibody specific for histone modifications H3K4me3 and H3K4me1; isolating nucleic acid from the cancerous biological sample having a signal ratio of H3K4me3 relative to H3K4me1 greater than 1, wherein the isolated nucleic acid comprises at least one region specific to said histone modifications; detecting a signal intensity of H3K4me3 in the isolated nucleic acid at a read depth of 20M; and determining the presence or absence of at least one cancer-associated promoter in the cancerous biological sample based on the change in the signal intensity of H3K4me3 relative to the signal intensity of H3K4me3 in a non-cancerous biological sample.

[0012] In one aspect, there is provided a biomarker comprising at least one promoter having a change in signal intensity of H3K4me3 in a cancerous biological sample relative to a non-cancerous biological sample for use in detecting cancer in a subject.

[0013] In one aspect, there is provided a use of a biomarker comprising at least one promoter having a change in signal intensity of H3K4me3 in a cancerous biological sample relative to a non-cancerous biological sample in the manufacture of a medicament for detecting cancer in a subject.

[0014] In one aspect, there is provided an inhibitor of EZH2 for use in modulating the activity of at least one cancer-associated promoter in a cell.

[0015] In one aspect, there is provided a use of an inhibitor of EZH2 in the manufacture of a medicament for modulating the activity of at least one cancer-associated promoter in a cell.

[0016] In one aspect, there is provided an inhibitor of EZH2 for use in modulating the immune response of a subject to cancer, wherein the EZH2 is associated with at least one cancer-associated promoter in the subject.

[0017] In one aspect, there is provided a use of an inhibitor of EZH2 in the manufacture of a medicament for modulating the immune response of a subject to cancer, wherein the EZH2 is associated with at least one cancer-associated promoter in the subject.

### Definitions

[0018] The following are some definitions that may be helpful in understanding the description of the present invention. These are intended as general definitions and should in no way limit the scope of the present invention to those terms alone, but are put forth for a better understanding of the following description.

[0019] As used herein, the term “promoter” is intended to refer to a region of DNA that initiates transcription of a particular gene.

[0020] As used herein, the term “cancerous” relates to being affected by or showing abnormalities characteristic of cancer.

[0021] As used herein, the term “biological sample” refers to a sample of tissue or cells from a patient that has been obtained from, removed or isolated from the patient. The term “obtained or derived from” as used herein is meant to be used inclusively. That is, it is intended to encompass any nucleotide sequence directly isolated from a biological sample or any nucleotide sequence derived from the sample.

[0022] As used herein, the term “antibody” or “antibodies” as used herein refers to molecules with an immunoglobulin-like domain and includes antigen binding fragments, monoclonal, recombinant, polyclonal, chimeric, fully human, humanised, bispecific and heteroconjugate antibodies; a single variable domain, single chain Fv, a domain antibody, immunologically effective fragments and diabodies.

[0023] The term “specifically binds” as used throughout the present specification in relation to antigen binding proteins means that the antigen binding protein binds to a target epitope on an antigen with a greater affinity than that which results when bound to a non-target epitope. In certain embodiments, specific binding refers to binding to a target with an affinity that is at least 10, 50, 100, 250, 500, or 1000 times greater than the affinity for a non-target epitope. For example, binding affinity may be as measured by routine methods, e.g., by competition ELISA or by measurement of Kd with BIACORE™, KINEXA™ or PROTEON™.

[0024] As used herein, the term “isolated” relates to a biological component (such as a nucleic acid molecule, protein or organelle) that has been substantially separated or purified away from other biological components in the cell of the organism in which the component naturally occurs, i.e., other chromosomal and extra-chromosomal DNA and RNA, proteins and organelles. Nucleic acids and proteins that have been “isolated” include nucleic acids and proteins purified by standard purification methods. The term also embraces nucleic acids and proteins prepared by recombinant expression in a host cell as well as chemically synthesized nucleic acids.

[0025] As used herein, the term “nucleic acid” refers to a deoxyribonucleotide or ribonucleotide polymer in either single, or double stranded form, and unless otherwise limited, encompassing known analogues of natural nucleotides that hybridize to nucleic acids in a manner similar to naturally occurring nucleotides, “Nucleotide” includes, but is not limited to, a monomer that includes a base linked to a sugar, such as a pyrimidine, purine or synthetic analogs thereof, or a base linked to an amino acid, as in a peptide nucleic acid (MA). A nucleotide is one monomer in a polynucleotide. A nucleotide sequence refers to the sequence of bases in a polynucleotide.

[0026] As used herein, the term “prognosis” or grammatical variants thereof, as used herein refers to a prediction of the probable course and outcome of a clinical condition or disease. A prognosis of a patient is usually made by evaluating factors or symptoms of a disease that are indicative of a favorable or unfavorable course or outcome of the disease. The term “prognosis” does not refer to the ability to predict the course or outcome of a condition with 100% accuracy. Instead, the term “prognosis” refers to an increased probability that a certain course or outcome will occur; that is, that a course or outcome is more likely to occur in a patient exhibiting a given condition, when compared to those individuals not exhibiting the condition.

[0027] As used herein, the term “modulating” is intended to refer to an adjustment of the immune response to a desired level.

[0028] As used herein, the term “annotated promoter” refers to a promoter mapping close (<500 bp) to a known Gencode transcription start site (TSS).

[0029] The term “unannotated promoter” refers to a promoter mapping to genomic regions devoid of known Gencode TSSs.

[0030] As used herein, the term “canonical” in the context of a promoter refers to a promoter region exhibiting unaltered H3K4me3 peaks.

[0031] As used herein, the term “detectable label” or “reporter” refers to a detectable marker or reporter molecules, which can be attached to nucleic acids. Typical labels include fluorophores, radioactive isotopes, ligands, chemiluminescent agents, metal sols and colloids, and enzymes. Methods for labeling and guidance in the choice of labels useful for various purposes are discussed, e.g., in Sambrook et al., in Molecular Cloning: A Laboratory Manual, Cold Spring Harbor Laboratory Press (1989) and Ausubel et al., in Current Protocols in Molecular Biology, Greene Publishing Associates and Wiley-Intersciences (1987),

[0032] As used herein, the term “hypomethylated” refers to a decrease in the normal methylation level of DNA,

[0033] As used herein, the term “hypermethylated” refers to an increase in the normal methylation level of DNA.

[0034] As used herein, the term “about”, in the context of concentrations of components of the formulations, typically means +/−5% of the stated value, more typically +/−4% of the stated value, more typically +/−3% of the stated value, more typically, +/−2% of the stated value, even more typically +/−1% of the stated value, and even more typically +/−0.5% of the stated value.

[0035] Throughout this disclosure, certain embodiments may be disclosed in a range format. It should be understood that the description in range format is merely for convenience and brevity and should not be construed as an inflexible limitation on the scope of the disclosed ranges. Accordingly, the description of a range should be considered to have specifically disclosed all the possible sub-ranges as well as individual numerical values within that range. For example, description of a range such as from 1 to 6 should be considered to have specifically disclosed sub-ranges such as from 1 to 3, from 1 to 4, from 1 to 5, from 2 to 4, from 2 to 6, from 3 to 6 etc., as well as individual numbers within that range, for example, 1, 2, 3, 4, 5, and 6. This applies regardless of the breadth of the range.

[0036] Certain embodiments may also be described broadly and generically herein. Each of the narrower species and subgeneric groupings falling within the generic disclosure also form part of the disclosure. This includes the generic description of the embodiments with a proviso or negative limitation removing any subject matter from the genus, regardless of whether or not the excised material is specifically recited herein.

[0037] Unless the context requires otherwise or specifically stated to the contrary, integers, steps, or elements of the invention recited herein as singular integers, steps or elements clearly encompass both singular and plural forms of the recited integers, steps or elements.

[0038] The word “substantially” does not exclude “completely” e.g. a composition which is “substantially free” from Y may be completely free from Y. Where necessary, the word “substantially” may be omitted from the definition of the invention.

[0039] The invention illustratively described herein may suitably be practiced in the absence of any element or elements, limitation or limitations, not specifically disclosed herein. Thus, for example, the terms “comprising”, “including”, “containing”, etc. shall be read expansively and without limitation. Additionally, the terms and expressions employed herein have been used as terms of description and not of limitation, and there is no intention in the use of such terms and expressions of excluding any equivalents of the features shown and described or portions thereof, but it is recognized that various modifications are possible within the scope of the invention claimed. Thus, it should be understood that although the present invention has been specifically disclosed by preferred embodiments and optional features, modification and variation of the inventions embodied therein herein disclosed may be resorted to by those skilled in the art, and that such modifications and variations are considered to be within the scope of this invention.

[0040] The invention has been described broadly and generically herein. Each of the narrower species and subgeneric groupings falling within the generic disclosure also form part of the invention. This includes the generic description of the invention with a proviso or negative limitation removing any subject matter from the genus, regardless of whether or not the excised material is specifically recited herein.

[0041] Other embodiments are within the following claims and non-limiting examples. In addition, where features or aspects of the invention are described in terms of Markush groups, those skilled in the art will recognize that the invention is also thereby described in terms of any individual member or subgroup of members of the Markush group.

### BRIEF DESCRIPTION OF THE DRAWINGS

[0042] The invention will be better understood with reference to the detailed description when considered in conjunction with the non-limiting examples and the accompanying drawings, in which

[0043] FIG. 1: Somatic Promoter Alterations in Primary Gastric Adenocarcinoma.

A) Example of an unaltered GC promoter. The UCSC genome track of the RHOA TSS (shaded box) highlights similar H3K4me3 signals in GC and matched normal samples. Similar signals are seen in GC lines. The bottom two tracks display similar levels of RNA expression in the same GC and matched normal sample (RNAseq).
B) Example of a gained somatic promoter. The UCSC genome track of the CEACAM6 TSS (shaded box) highlights gain of H3K4me3 signals in GC samples and GC lines, compared to matched normal samples. In contrast, no changes are observed at the TSS of CEACAM5, an adjacent gene. Concordant tumor-specific gain of RNA expression is shown in the bottom 2 tracks displaying RNA-seq profiles of the same GC and matched normal samples.
C) Example of a lost somatic promoter. The UCSC genome track of the ATP4A TSS (shaded box) highlights loss of H3K4me3 signals in GC samples and GC lines compared to matched normal samples. Concordant tumor-specific loss of RNA expression is shown in the bottom 2 tracks displaying RNA-seq profiles of the same GC and gastric normal samples.
D) Heatmap of H3K4me3 read densities (row scaled) of somatic promoters (rows) in primary GCs and matched normal samples.
E) Correlation between H3K4me3 promoter signals and H3K27ac activity signals in primary gastric samples (r=0.91, P<0.001). Each data point corresponds to a single H3K4me3 hi/H3K4me1 lo region. Analysis was performed using data from 16 N/T pairs (Table 4).
F) Top 5 gene sets associated with canonical gained and lost somatic promoters. Genesets associated with genes up and downregulated in GC are rediscovered. Also note that gene sets related to H3K27me3 and SUZ12, a PRC2 component, are enriched.

[0044] FIG. 2: Association of Somatic Promoter Alterations with Gene Expression in GC and Other Tumor Types

A) Example of a GC somatic promoter. Example is for illustrative purposes only.
B) Changes in RNA-seq expression (top) and DNA methylation (bottom) in discovery samples between somatic promoters and all promoters. Top—Boxplot depicting changes in RNA-seq expression between 9 paired primary GC and gastric normal samples at genomic regions exhibiting somatic promoters (gained and lost) (***P<0.001, Wilcoxon Test). Bottom—Boxplot depicting changes in DNA methylation (β-values) at regions exhibiting somatic promoters between 20 paired GC and gastric normal samples, compared to all promoters. (***P<0.001, Wilcoxon test)
C) Independent Validation Cohorts. Boxplot depicting changes in RNA-seq expression at genomic regions exhibiting somatic promoters across 354 (321 GC, 33 normal) TCGA Stomach adenocarcinoma (STAD) samples, compared to all promoters (***P<0.001, Wilcoxon test)
D) Somatic Promoters in Other Cancer Types. Boxplot depicting changes in RNA-seq expression at genomic regions exhibiting GC somatic promoters compared against all promoters, across 326 TCGA Colon adenocarcinoma (COAD) samples (286 COAD, 40 normal; ***P<0.001, Wilcoxon test), 170 TCGA kidney renal clear cell carcinoma (ccRCC) samples (98 ccRCC and 72 normal; ***P<0.001, Wilcoxon test), and 115 TCGA lung adenocarcinoma (LUAD) samples (58 LUAD, 57 normal; ***P<0.001 somatic gain vs all promoters and somatic gain vs. somatic loss, Wilcoxon test).

[0045] FIG. 3: Alternative Promoters in GC

A) UCSC browser track of the HNF4α gene. GC and matched gastric normal samples have equal H3K4me3 signals at the canonical HNF4α promoter. However, an alternative promoter, seen by H3K4me3 gain, can be observed at a downstream TSS in GCs compared to matched normals. At the RNA level, both in-house and TCGA STAD samples also show gain of gene expression at the alternate promoter TSS compared to normal samples.
B) UCSC browser track of the EPCAM gene. Another example of alternative promoter usage at a downstream TSS. Gain of H3K4me3 is observed at a TSS downstream of the canonical promoter, while the canonical promoter exhibits equal H3K4me3 signals in GC and gastric normal. Gain of RNA-seq expression can also be observed in GC at the alternative promoter driven transcript in both in-house and TCGA STAD samples.
C) UCSC browser track of the RASA3 gene, demonstrating H3K4me3 and RNA-seq signals highlighting gain of promoter activity at an un-annotated TSS (dark grey box) corresponding to a novel N-terminal truncated RASA3 transcript. Expression of this variant transcript was validated through 5′RACE in GC lines (bottom).
D) Functional domains of the translated RASA3 canonical and alternate isoform. The alternate transcript is predicted to encode a RASA3 protein missing the RASGAP domain. E) Effect of overexpression of RASA3 canonical (CanT) and alternate (SomT) isoforms on the migration capability of SNU1967 (top) and GES1 (bottom) cells. Representative images of RASA3-Ctl (Empty vector), RASA3-CanT and RASA3-SomT in migration assays (n=3). Barplots show the % area of migrated cells vs the area of transwell membrane. Data is shown as mean±SD; n=3. (*P<0.05, **P<0.01, ***P<0.001, Student's one sided t-test)

[0046] FIG. 4: Somatic Promoter Alterations Exhibit Immunoediting Signatures

A) Schematic outlining alternative promoter usage leading to alternative transcript usage (Transcript box) and N terminally truncated protein isoforms (protein box).
B) Barplot showing the average % of peptides with predicted high-affinity binding to MHC Class I (HLA-A, B, and C, IC<=50 nm). N-terminal peptides associated with recurrent somatic promoters (alternative promoters) show significantly enriched predicted MHC I binding compared to canonical GC peptides (P<0.01, Fisher's test), random peptides from the human proteome (P<0.001) and C-terminal peptides (P<0.01) derived from the same genes exhibiting the N-terminal alterations. Canonical peptides refer to peptides derived from protein coding genes overexpressed in GC through non-alternative promoters.
C) Percentage (%) of high affinity peptides predicted to bind different HLA-alleles categorized by somatic gain or loss. Most alleles have a greater number of N-terminal lost peptides predicted to have high binding affinity.
D) Quantification of somatic promoter expression using Nanostring profiling. Top—Distinct Nanostring probes were designed to measure expression of alternate and canonical promoter driven transcripts. 2 probes were designed for each gene—a canonical probe at the 5′ transcript marked by unaltered H3K4me3, and an alternate probe at the 5′ transcript of the somatic promoter. Bottom—Heatmap of alternative promoter expression from 95 GCs and matched normal samples. GC samples have been ordered left to right by their levels of somatic promoter usage.
E) Association between Somatic Promoters and T-cell immune correlates (Singapore (SG) cohort). Top left—Expression of T-cell markers CD8A (P=0.1443) and the T-cell cytolytic markers GZMA (P=0.0001) and PRF1 (P=0.00806) in GC samples with either high or low somatic promoter usage (SG). Samples with high alternative promoter usage show lower expression of immune markers. All P values are from Wilcoxon one sided test. Right-Kaplan-Meier analysis comparing overall survival curves between validation samples with high somatic promoter usage (top 25%) and low somatic promoter usage (bottom 25%) (HR=2.56, P=0.02).
F) Association of Somatic Promoters with T-cell Correlates in TCGA and ACRG Cohorts. (Left) Expression of T-cell markers CD8A (P=0.02), GZMA (P=0.01) and PRF1 (P=0.03) in TCGA STAD with either high or low somatic promoter usage. T-cell markers were evaluated by RNA-seq (Transcripts per million, Right) Expression of T-cell markers CD8A (P=0.035), GZMA (P=0.001) and PRF1 (P=0.025) in ACRG GC samples with either high or low somatic promoter usage. All P values are from Wilcoxon one sided test.
G) EpiMAX Heatmap of total cytokine responses (Fold change relative to Actin) for 15 peptide pools against 9 donors.
H) Individual cytokine responses against 15 peptides for two individual donors (Donor 2 and Donor 3) showing complex cytokine responses (FC2).

[0047] FIG. 5: Somatic Promoters are Associated with EZH2 Occupancy

A) Binding enrichment of ReMap-defined TFBSs at genomic regions exhibiting somatic promoters. TFs were sorted according to their binding frequency at all H3K4me3-defined promoter regions. EZH2 and SUZ12 binding sites significantly overlap regions exhibiting somatic promoters (gained and lost) (P<0.01, Empirical distribution test).
B) Proportion of RNA transcripts associated with somatic promoters changing upon GSK126 treatment in IM95 cells, compared to RNA transcripts associated with unaltered promoters. The top somatic promoter figure is for illustrative purposes only. Unaltered promoters were defined as all gene promoters except the somatic promoters. The proportion of genes changing upon treatment, as a proportion of all genes, is also shown. Somatic promoters are more likely to change expression after GSK126 treatment relative to unaltered promoters (OR 1.46, P<0.001) or all GSK126 regulated genes (OR 9.21, P<0.001, Fisher Test)
C) UCSC browser track of the SLC9A9 TSS, a gene with loss of promoter activity. Gain of expression is seen after inhibition of EZH2 using GSK126 in IM95 cells at both day 6 (D6) and Day 9 (D9) treatment.
D) UCSC browser track of the PSCA TSS, with loss of promoter activity. Gain of expression is seen after inhibition of EZH2 using GSK126 in IM95 cells at both day 6 (D6) and Day 9 (D9) treatment.

[0048] FIG. 6: Somatic promoters reveal novel cancer-associated transcripts

A) Distribution of distances for different promoter categories to the nearest annotated TSSs. (left) The first barplot shows distance distributions for promoters present in gastric normal tissues, the second for promoter present in GC samples, and the third for promoters exhibiting somatic alterations (i.e. different in tumor vs normal). (right) The barplots present distance distributions associated with either lost or gained somatic promoters. A substantial proportion of gained somatic promoters occupy locations distant from previously annotated TSSs
B) Median functional scores of unannotated promoters as predicted by GenoSkyline across 7 different tissues. Unannotated promoters exhibited high functional scores for GI, fetal and ESC tissues.
C) Boxplot depicting average RNA-seq reads for CAGE-validated promoters, comparing either all promoters or somatic promoters and also supported by CAGE data. (**P<0.001, Wilcoxon one sided test). Somatic promoters are observed to have lower levels of RNA-seq expression.
D) Cartoon depicting proposed effects of dynamic range on NanoChIP-seq and RNA-seq sensitivity in detecting lowly expressed transcripts. Due to a more restricted dynamic range, epigenomic profiling may detect active promoters missed by RNA-sequencing, due to the random sampling of abundantly expressed genes by RNAseq.
E) Down and Up-sampling analysis. The y-axis depicts the number of transcripts detected that overlap either all promoters or somatic promoters at varying RNA-sequencing depths. Original primary sample RNA-seq data was sequenced at ˜106M reads which was down-sampled to 20M, 40M and 60M reads. Deep RNA-seq data was additionally generated at ˜139M read depth.
F) Cancer-associated transcripts detected at deep but not regular RNA-seq depth. The UCSC genome browser track for ABCA13 shows an example of a novel transcript detected by NanoChIP-seq at a read depth of 20M but only detected by RNA-sequencing at read depth of ˜139M (Deep sequencing GC). This transcript is not detected by regular depth RNA-seq (GC).

[0049] FIG. 7: Chromatin Profiles of Primary GC

A) Chromatin profiles of primary GCs, matched normal gastric mucosae, and GC cell lines for 3 marks (H3K4me3, H3K27ac and H3K4me1). Shown are UCSC genome browser tracks of the GC driver gene MYC highlighting strong H3K4me3 and H3K27ac signals and low H3K4me1 at promoter locations
B) H3K4me3, H3K27ac and H3K4me1 signal distributions at transcription start sites (TSS). Line plots show the distribution of chromatin signals for H3K4me3 hi/H3K4me1 lo regions at TSS regions (+/−3 kb). Heatmaps were plotted using ngs.plot(6) for the top 10,000 H3K4me3 hi/H3K4me1 lo regions
C) Density distributions of H3K4me3:H3K4me1 ratios at identified H3K4me3 regions. All regions with H3K4me3/H3K4me1 ratios >1 were selected for further analysis (73%)
D) Distribution of H3K4me3 hi/H3k4me1 lo regions against representative gene body features (top). The arrow represents the TSS.
E) Enrichment of H3K4me3 hi/H3K4me1 lo regions against 15 chromatin states (columns) defined in different gastrointestinal tissues from the Epigenome Roadmap database (rows). Each column is scaled from 0 to 1.
F) Overlap of H3K4me3 hi/H3K4me1 lo regions with FANTOMS CAGE data

[0050] FIG. 8: Epithelial features of GC promoters

A) Spearman correlation heat-map between H3K4me3 signals of primary GC, gastric normal samples (red type, highlighted by red arrow) and various tissue types from the Epigenome Roadmap database across all H3K4me3 hi/H3K4me1 lo regions
B) Overlap of H3K4me3 hi/H3K4me1 lo regions with H3K4me3 regions identified in GC cell lines (87%), gastrointestinal fibroblast cells (61%) and colon carcinoma lines (74%)

[0051] FIG. 9: GC Somatic Promoter Features

A) Differential (somatic) H3K4me3 regions identified from 2 independent algorithms DESeq2 and edgeR. 96% of regions identified from DESeq2 overlapped those identified using edgeR. Both sets were pooled for subsequent analysis.
B) Principal component analysis of 16 GC and gastric normal samples based on somatic promoters
C) Heatmap of H3K27ac read densities across 16 GC and gastric normal samples across 1959 somatic promoters.
D) Correlation between H3K4me3 promoter signals and H3K27ac activity signals in primary gastric samples for gained somatic (Left, r=0.78, p<0.001) and lost somatic (Right, r=0.82, p<0.001) promoters. Each data point corresponds to a single H3K4me3 hi/H3K4me1 lo region. Analysis was performed using data from 16 N/T pairs (Table 4).
E) Volcano plot of somatic promoters (Top) highlighting the dynamic range of fold changes differences (x-axis) and the false discovery rate (FDR)-adjusted significance (−log 10 scale, y axis). The majority of the somatic promoters lie between FC 1 and 2.82, which likely reflects the dynamic range of Chip-seq. The Table (bottom) lists the number of somatic promoters identified at differing levels of stringency. Despite varying FDR thresholds, the majority of differential peaks are still preserved (e.g. 59% at q<0.01).
F) Enrichment analysis of somatic promoters at varying fold change and FDR (q value) for top 5 genesets (FIG. 1F) associated with gained (red) and lost somatic promoters (blue). X axis reflects the −log 10 p value for gene-sets found to be enriched in subsets of somatic promoters. Even at stricter fold change (FC 2) and q-value thresholds (0.05, 0.01 and 0.001), similar GC specific and PRC2 associated signatures are still observed.

[0052] FIG. 10: Association of Somatic Promoters with Gene Expression in GC and Other Tumor Types

A) Example of a GC somatic promoter. Example is for illustrative purposes only.
B) Changes in RNA-seq expression (top) and DNA methylation (bottom) discovery samples between somatic promoters and unaltered promoters. Top—Boxplot depicting changes in RNA-seq expression between 9 paired primary GC and gastric normal samples at genomic regions exhibiting somatic promoters (gained and lost) (***P<0.001, Wilcoxon Test). Bottom—Boxplot depicting changes in DNA methylation (β-values) at regions exhibiting somatic promoters between 20 paired GC and gastric normal samples, compared to unaltered promoters (***P<0.001, Wilcoxon test)
C) Independent Validation Cohorts. Boxplot depicting changes in RNA-seq expression at genomic regions exhibiting somatic promoters across 354 (321 GC, 33 normal) TCGA Stomach adenocarcinoma (STAD) samples, compared to unaltered promoters (***P<0.001, Wilcoxon test)
D) Somatic Promoters in Other Cancer Types. Boxplot depicting changes in RNA-seq expression at genomic regions exhibiting GC somatic promoters compared to unaltered promoters, across 328 TCGA Colon adenocarcinoma (COAD) samples (286 COAD, 40 normal; ***P<0.001, Wilcoxon test), 170 TCGA kidney renal clear cell carcinoma (ccRCC) samples (98 ccRCC and 72 normal; ***P<0.001, Wilcoxon test), and 115 TCGA lung adenocarcinoma (LUAD) samples (58 LUAD, 57 normal; ***P<0.001 Somatic gain vs unaltered and somatic gain vs somatic loss, *P<0.05 Somatic loss vs unaltered, Wilcoxon test).

[0053] FIG. 11: Changes in DNA methylation at CpG island containing promoters

A) Boxplot depicting changes in DNA methylation (β-values) at CpG island bearing somatic promoters between 20 paired GC and gastric normal samples, compared to all promoters bearing CpG islands (**P<0.001, Wilcoxon test)

[0054] FIG. 12: Expression distribution of alternative and canonical isoforms

A) Barplot showing distribution of T/N ratios of canonical and alternative transcript isoforms for all alternative transcripts (Global—top), HNF4α (middle), and EPCAM (bottom) using four independent quantification techniques, Cufflinks, MISO, Kallisto and NanoString. The Nanostring platform is introduced in FIG. 4 of the Main Text. ++ Nanostring analysis is confined to queried probes. (*P<0.05, **P<0.01, ***P<0.001, Wilcoxon one sided test).
B) Boxplot showing the T/N ratio of N-terminal reads mapping to canonical promoters, compared to N-terminal reads mapping to alternative promoters. Alternative promoter driven transcripts exhibit significantly higher T/N ratios (p=0.04, Wilcoxon one sided test).

[0055] FIG. 13: Characterization of RASA3 Isoform

A) UCSC browser track of the RASA3 gene demonstrating H3K4me3 and RNA-seq signals at Somatic and Canonical TSSs. The Canonical TSS has equal signals while the Somatic TSS shows gain of promoter activity at an un-annotated TSS corresponding to a novel N-terminal truncated RASA3 transcript.
B) UCSC browser track of the RASA3 gene demonstrating RNA-seq signals for the NCC24 GC cell line at Somatic and Canonical TSSs. NCC24 only expresses RASA3 SomT (also see C).
C) Left—Identification of RASA3 SomT and CanT transcripts in NCC24 and NCC59 GC cells by 5′RACE. A third line (MKN1), was negative for RASA3 SomT as shown in the gel picture. A no-RNA template was run as a negative control. Right-Western Blot highlighting expression of RASA3 SomT protein in NCC24 cells.
D) RAS GTP assays. (left) The Western blot shows levels of RAS in GES1 cells transfected with either empty vector (EV), RASA3 CanT or RASA3 SomT (n=3). GES1 cells were serum-starved overnight followed by serum stimulation for 30 minutes prior to harvest and a RAS-GTP pull down assay. Total RAS was measured in corresponding whole cell protein lysates. β-actin was used as a loading control. Positive (GTP) and negative (GDP) controls from the pull down assay are also shown. (right) The barplot quantifies active RAS intensity from three independent pull-down assays, performed in GES1 cells transfected with either empty vector (EV), RASA3 CanT or RASA3 SomT under FBS exposed conditions. Data is shown as mean±SD; n=3. (*P<0.05, Student's two sided t-test).
E) Cell proliferation assays of SNU1967, GES1 and AGS cells after transfection with RASA3 CanT and SomT normalized to Day 0. (Data is shown as mean±SD performed in triplicate, representative of 3 independent experiments).
F) Effect of overexpression of RASA3 CanT and SomT isoforms on the invasive capability of GES1 and SNU1967 cells. Representative images of EV, RASA3-WT and RASA3-Var in invasion assay (n=3). Barplot showing % area of invaded cells vs the area of transwell membrane. Data is shown as mean±SD; n=3. (*P<0.05, **P<0.01, ***P<0.001, Student's one sided t-test).
G) Effect of overexpression of RASA3 CanT and SomT protein isoforms on the migration capability of highly migratory KRAS mutated AGS cells. Barplot showing % area of migrated cells vs the area of transwell membrane. Data is shown as mean±SD; n=3. (*P<0.05, **P<0.01, ***P<0.001, Student's one sided t-test). RASA3 WT induces more potent migration suppression than RASA3 Var, suggesting that RASA3 WT is a migration inhibitor.
H) siRNA-mediated knockdown of RASA3 SomT in NCC24 cells. Cells were treated with sc-siRNA (control) and 2 RASA3 siRNAs (siRNA1-hs.Ri.RASA3.13 TriFECTa® Kit DsiRNA and siRNA-3-Silencer® Select Pre-Designed siRNA s355). (Left) Barplots showing fold change differences in mRNA expression of RASA3 SomT after treatment with siRNA-1 and siRNA-3. Data is shown as mean±SD; n=3. (Right) Western blotting results confirming RASA3 SomT protein reductions. Cells were harvested and lysed after 48 hrs of transfection. (***P<0.001, Student's one sided t-test).
I) Effect of siRNA knockdown of RASA3 SomT isoform on the migration (left) and invasive (right) capability of NCC24 cells from two independent siRNAs. Representative images of sc-siRNA (control), siRNA-1, and siRNA-3 in migration and invasion assays (n=3). Barplot showing % area of migrated/invaded cells vs the area of transwell membrane. Data is shown as mean±SD; n=3. (*P<0.05, **P<0.01, ***P<0.001, Student's one sided t-test).

[0056] FIG. 14: Characterization of MET Isoforms

A) UCSC browser track of the MET gene, demonstrating H3K4me3 and RNA-seq signals highlighting gain of promoter activity at an alternative downstream locus (dark grey box).
B) Functional domains of the MET canonical (WT) and alternative (Var) isoform. The alternative isoform is predicted to encode a MET protein with an N terminally truncated SEMA domain.
C) Expression of MET (Var) transcripts in GC lines, as detected by 5′RACE.
D) Western blot of HEK293 cells transfected with empty vector (EV), MET canonical full length (MET-WT) and truncated Variant (MET-Var) at 0, 15 and 30 minutes of HGF treatment (100 ng/ml) (n=3). GAB1, STAT3 and ERK1/2 are known downstream effectors of MET signaling. Number below each band is the quantified intensity using Image Lab. In both untreated and HGF-treated conditions, MET-Var transfected cells exhibited higher levels of p-Gab1 (Y627), a key mediator of MET signaling (2.48-3.95 fold, p=0.003 (untreated), p<0.05 (T15 and T30). In untreated samples, cells transfected with MET-Var also exhibited higher pERK1/2 levels (2.74 fold) and also higher p-STAT3 (Y705) levels (1.80 fold) compared to MET-WT (p=0.023 and p=0.026 for pERK and p-STAT3 (Y705) respectively).
E) Bar graphs showing increase in pERK1/2 for EV, MET-WT and MET-Var at T0, T15 and T30, reflecting effects of HGF treatment. Data is shown as mean±SD; n=3. (*P<0.05, **P<0.01, ***P<0.001, Student's one sided t-test)
F) Bar graphs showing increase in p-GAB1 (Y627), p-STAT3 (Y705), and pERK1/2 in cells transfected with MET-Var compared to EV and MET-WT. Graphs for all 3 time points are shown. Data is shown as mean±SD; n=3. (*P<0.05, **P<0.01, ***P<0.001, Student's one sided t-test)

[0057] FIG. 15: Immunogenicity of N-terminal peptides

A) Barplot showing average % of N-terminal peptides with predicted high-affinity binding to MHC Class I HLA-A (IC<=50 nm). As comparison, the figure in the Main Text represents average % s based on all three HLA classes (HLA-A, HLA-B, HLA-C). N-terminal peptides associated with recurrent somatic alternative promoters show significantly enriched predicted MHC I binding compared to canonical GC peptides (p<0.01), random peptides from human proteome and C-terminal peptides (p<0.001, Fisher's Test) derived from the same genes exhibiting the N-terminal alterations.
B) MHC Binding Predictions using N-terminal peptides inferred by RNA-seq analysis alone. Annotated transcripts exhibiting different N-terminal exons in GC vs normals were identified using two different RNA-seq algorithms (DEXSeq(7) and Voom-diffsplice(8)) (FC>=2, FDR 0.05). This analysis identified 96 genes with potential alternative N-terminal transcripts, of which 46 (48%) were predicted to result in differing N terminal peptides (Purple bar).

[0058] FIG. 16: Immunogenicity Assay and Nanostring Profiling

A) Scatter plot of fold change (T vs N) of expression of alternate and canonical probes from NanoString and RNA-seq data of the same samples. An improved correlation is observed using the alternate probes
B) Left—Expression of T-cell markers CD8A, GZMA and PRF1 in SG series (top), TCGA STAD (middle) and ACRG cohort (bottom) with high or low somatic promoter usage after adjustment of tumor purities as estimated by ASCAT. P values (Wilcoxon one sided test) are: CD8A—p=0.09 (SG), 0.004 (TCGA), 0.3 (ACRG); GZMA—0.0001 (SG), 0.002 (TCGA), 0.166 (ACRG), PRF1—0.013 (SG), 0.006 (TCGA), 0.3 (ACRG). Right—Expression of T-cell markers CD8A, GZMA and PRF1 in SG series (top), TCGA STAD (middle) and ACRG cohort (bottom) with high or low somatic promoter usage after adjustment of tumor content as estimated by ESTIMATE. p values (Wilcoxon one sided test) are: CD8A—p=0.28 (SG), 0.17 (TCGA), 0.37 (ACRG), GZMA—0.0005 (SG), 0.03 (TCGA), 0.09 (ACRG), PRF1—0.02 (SG), 0.22 (TCGA), 0.17 (ACRG). Samples with high alternative promoter usage are in red, while those with low usage are in blue.
C) Kaplan-Meier analysis comparing overall survival curves between validation samples with high somatic promoter usage and low somatic promoter usage (split by median) (HR=1.81, P=0.04)
D) Left—Expression of T-cell markers CD8A, GZMA and PRF1 in TCGA STAD with high or low somatic promoter usage after adjustment of mutation burden. P values (Wilcoxon one sided test) are: P=0.02 (CD8A), 0.01 (GZMA) and 0.03 (PRF1). Right—Expression of T-cell markers CD8A, GZMA and PRF1 in ACRG cohort with high or low somatic promoter usage after adjustment of mutation burden. P values (Wilcoxon one sided test) are: P=0.167 (CD8A), 0.009 (GZMA) and 0.03 (PRF1).
E) Heatmap of alternative promoter expression from 264 ACRG GCs for all gained alternative promoters. GC samples have been ordered left to right by their levels of somatic promoter usage.

[0059] FIG. 17: Functional Assessment of Peptide Immunogenicity

A) Individual cytokine responses against 15 peptides for other normal donor PBMCs tested against different peptide pools.
B) Experimental Immunogenicity Assay. Experimental design of in-vitro assay—i) Immature dendritic cells (DCs) cultured from CD14⁺ monocytes from HLA-A02:06 donors were differentiated in mature DCs (see Methods). Mature DCs were exposed to isogenic GC cell lysates (AGS cells) expressing Canonical (CanT) and Somatic (SomT) RASA3 isoforms. ii) Antigen presentation and T-cell activation: DCs presenting Can or Som RASA3 isoforms were co-cultured with HLA-matched T cells, resulting in T-cells primed against CanT or SomT RASA3. Primed T cells were then independently co-cultured with RASA3 CanT or RASA3 SomT expressing GC cells for two days, and markers of T-cell activation were assessed.
C) Concentration of interferon-gamma (IFN-γ) secretion by co-culture of T cells primed with RASA3 CanT or SomT Isoforms, after antigen challenge. RASA3 CanT primed T cells released significantly more IFN-γ when co-cultured with RASA3 CanT expressing cells, compared to T cells primed with RASA3 SomT and co-cultured with RASA3 SomT expressing cells (P=0.02, representative of n=3 experiments). IFN-γ levels were determined by ELISA.

[0060] FIG. 18: EZH2 Inhibition

A) Barplot showing increased enrichment of EZH2 binding sites in HFE-145 cells at somatic promoters compared to all promoters (P<0.01).
B) Growth curves of IM95 GC cells after GSK126 administration. Cell proliferation was monitored from 24 to 216 hours and represented relative to DMSO control treated cells (means±s.e.m. represents data from three experiments, and each experiment was performed in duplicate)
C) Top 5 enriched curated gene sets (C2) for the set of genes identified from differential analysis of GSK126 treated vs DMSO control IM95 RNA-seq data at promoter loci.
D) UCSC browser track of alternative promoter ESRRG with loss of promoter activity (GC (red) and normal gastric tissue (blue) H3K4me3). Gain of expression is seen after inhibition of EZH2 using GSK126 in IM95 cells at both day 6 (D6) and Day 9 (D9) treatment.

[0061] FIG. 19: Unannotated somatic promoters

A) Barplot showing fold enrichment of L1 (FC=8.02, P<0.001) and ERV1 (FC=2.78, P<0.001) repeat elements at unannotated promoter regions compared to all promoters
B) Boxplot comparing H3K27ac signals (rpm) at unannotated somatic promoters with annotated somatic promoters. Unannotated somatic promoters have lower H3K27ac signals.

### DETAILED DESCRIPTION OF THE PRESENT INVENTION

[0062] In a first aspect, the present invention refers to a method for determining the presence or absence of at least one promoter in a cancerous biological sample relative to a non-cancerous biological sample. The method comprises contacting the cancerous biological sample with at least one antibody or antibodies specific for histone modifications H3K4me3 and H3K4me1; isolating nucleic acid from the cancerous biological sample having a signal ratio of H3K4me3 relative to H3K4me1 greater than 1, wherein the isolated nucleic acid comprises at least one region or regions specific to said histone modifications; detecting a signal intensity of H3K4me3 in the isolated nucleic acid; and determining the presence or absence of at least one promoter in the cancerous biological sample based on the change in the signal intensity of H3K4me3 relative to the signal intensity of H3K4me3 in a non-cancerous biological sample.

[0063] In one embodiment, the cancerous and non-cancerous biological sample may comprise a single cell, multiple cells, fragments of cells, body fluid or tissue. In one embodiment the cancerous and non-cancerous biological sample may be obtained from the same subject.

[0064] In one embodiment, the cancerous and non-cancerous biological sample are each obtained from different subjects.

[0065] The contacting step in accordance with the method as described herein may comprise the immunoprecipitation of chromatin with the antibodies specific for the histone modifications. Examples of histone modification include but are not limited to H3K27ac, H3K4me3, H3K4me1. In a preferred embodiment, the histone modification is H3K4me3 and/or H3K4me1. In yet another embodiment, the histone modification is H3K27ac.

[0066] The method may further comprise mapping at least one promoter from the cancerous biological sample against at least one reference nucleic acid sequence to identify a gene transcript associated with the at least one promoter.

[0067] In some embodiments, the at least one reference nucleic acid sequence may comprise a nucleic acid sequence derived from: i) an annotated genome sequence; ii) a de novo transcriptome assembly; and/or iii) a non-cancerous nucleic acid sequence library or database.

[0068] In one embodiment, the change of signal intensity of H3K4me3 may be greater than a 0.5 fold, greater than a 1 fold, greater than a 1.5 fold, greater than a 2 fold, greater than a 2.5 fold or greater than a 3 fold increase or decrease relative to the signal intensity of H3K4me3 in the non-cancerous biological sample. In a preferred embodiment, the change of signal intensity of H3K4me3 may be greater than a 1.5 fold increase or decrease relative to the signal intensity of H3K4me3 in the non-cancerous biological sample. In another embodiment, the change of signal intensity of H3K4me3 greater than a 0.5 fold, greater than a 1 fold, greater than a 1.5 fold, greater than a 2 fold, greater than a 2.5 fold or greater than a 3 fold increase relative to the signal intensity of H3K4me3 in a non-cancerous biological sample, may correlate to the presence of at least one cancer-associated promoter in the cancerous biological sample.

[0069] In a preferred embodiment the change of signal intensity of H3K4me3 greater than a 1.5 fold increase relative to the signal intensity of H3K4me3 in a non-cancerous biological sample, may correlate to the presence of at least one cancer-associated promoter in the cancerous biological sample.

[0070] In one embodiment, the activity of the at least one cancer-associated promoter may correlate with an increase of SUZ12 or EZH2 binding sites relative to the total promoter population.

[0071] In one embodiment, an increase of SUZ12 or EZH2 binding sites correlates with an upregulation of activity of the at least one cancer-associated promoter. In another embodiment, the increase of SUZ12 or EZH2 binding sites correlates with a downregulation of activity of the at least one cancer-associated promoter.

[0072] In one embodiment, the at least one promoter may be a canonical promoter that is positioned within 100 bp, 200 bp, 300 bp, 400 bp, 500 bp, 600 bp, 700 bp, 800 bp, 900 bp or 1000 bp from a known gene transcript start site. In a preferred embodiment, the at least one promoter may be a canonical promoter that is positioned within 500 bp from a known gene transcript start site. The gene transcript start site may be associated with one or more of a cell-type specification gene, a cell adhesion gene, a cell mediated immunity gene, a gastric cancer-associated or deregulated gene, a PRC2 target gene or a transcription factor. In one embodiment, the gene transcript start site may be associated with an oncogene. The gene transcript start site may be associated with a gene selected from the group consisting of MYC, MET, CEACAM6, CLDN7, CLDN3, HOTAIR, PVT1, HNF4a, RASA3, GRIN2D, EpCAM and a combination thereof.

[0073] In one embodiment, the cancer is gastrointestinal cancer, gastric cancer or colon cancer.

[0074] In another embodiment, the at least one promoter may be an alternative promoter that may be associated with a canonical promoter, wherein the canonical promoter may be present in both the cancerous biological sample and the non-cancerous biological sample, and i) wherein the alternative promoter may be only present in the cancerous biological sample, or ii) wherein the alternative promoter may be only absent in the cancerous biological sample.

[0075] In some embodiments, the at least one promoter is an unannotated promoter that is positioned more than 100 bp, more than 200 bp, more than 300 bp, more than 400 bp, more than 500 bp away, more than 600 bp, more than 700 bp, more than 800 bp, more than 900 bp or more than 1000 bp from a gene transcript start site. In a preferred embodiment, the at least one promoter is an unannotated promoter that is positioned more than 500 bp away from a gene transcript start site.

[0076] In one embodiment, the method as described herein further comprises measuring the expression level of the at least one alternative promoter in the cancerous biological sample and non-cancerous biological sample, wherein the measuring comprises digital profiling of reporter probes; and determining the differential expression level of the at least one alternative promoter relative to the non-cancerous biological sample, based on the digital profiling of the reporter probes, to validate the presence or absence of at least one alternative promoter in the cancerous biological sample relative to a non-cancerous biological sample.

[0077] The step of measuring may be conducted using a NanoString™ platform.

[0078] In another aspect, the present invention provides a method for determining the prognosis of cancer in a subject. The method comprises contacting a cancerous biological sample obtained from the subject with at least one antibody or antibodies specific for histone modification H3K4me3 and H3K4me1; isolating nucleic acid from the cancerous biological sample having a signal ratio of H3K4me3 relative to H3K4me1 greater than 1, wherein the isolated nucleic acid comprises at least one region or regions specific to said histone modifications; detecting a signal intensity of H3K4me3 in the isolated nucleic acid; and determining the presence or absence of at least one cancer-associated promoter in the cancerous biological sample based on the change in the signal intensity of H3K4me3 relative to the signal intensity of H3K4me3 in a reference nucleic acid sequence, wherein the presence or absence of the at least one cancer-associated promoter in the cancerous biological sample is indicative of the prognosis of the cancer in the subject.

[0079] In one embodiment, the at least one cancer-associated promoter may be an alternative promoter that is associated with a canonical promoter, wherein the canonical promoter may be present in both the cancerous biological sample and the reference nucleic acid sequence, and i) wherein the alternative promoter may be only present in the cancerous biological sample, or ii) wherein the alternative promoter may be only absent in the cancerous biological sample.

[0080] The presence or absence of the at least one alternative promoter in the cancerous sample may indicative of a poor prognosis of cancer survival in the subject.

[0081] In one embodiment the method as described herein further comprises measuring the expression level of the at least one alternative promoter in the cancerous biological sample and the reference nucleic acid sequence, wherein the measuring comprises digital profiling of reporter probes; and determining the differential expression level of the at least one alternative promoter relative to the non-cancerous biological sample, based on the digital profiling of the reporter probes, to validate the presence or absence of at least one alternative promoter in the cancerous biological sample relative to the reference nucleic acid sequence.

[0082] The step of measuring may be conducted using a NanoString™ platform.

[0083] In another aspect the present invention provides a biomarker for detecting cancer in a subject, the biomarker comprising at least one promoter having a change in signal intensity of H3K4me3 in a cancerous biological sample relative to a non-cancerous biological sample.

[0084] In one embodiment, the at least one promoter comprises an increase of EZH2 binding sites relative to the total promoter population. In one embodiment, the at least one promoter may be hypomethylated. In another embodiment, the at least one promoter may be hypermethylated.

[0085] The at least one promoter may be a canonical promoter that is positioned less than 500 bp away from a gene transcript start site. In one embodiment, the gene transcript start site may be associated with one or more of a cell-type specification gene, a cell adhesion gene, a cell mediated immunity gene, a gastric cancer-associated or deregulated gene, a PRC2 target gene or a transcription factor. In one embodiment, the gene transcript start site may be associated with an oncogene.

[0086] In one embodiment, the gene transcript start site may be associated with a gene selected from the group consisting of MYC, MET, CEACAM6, CLDN7, CLDN3, HOTAIR, PVT1, HNF4α, RASA3, GRIN2D, EpCAM or a combination thereof.

[0087] In one embodiment, the at least one promoter may be an alternative promoter that may be associated with a canonical promoter, wherein the canonical promoter may be present in both a cancerous sample and a non-cancerous sample, and i) wherein the alternative promoter may be only present in a cancerous sample, or ii) wherein the alternative promoter may be only absent in a cancerous sample.

[0088] In one embodiment, the at least one promoter may be an unannotated promoter that may be positioned more than 100 bp, more than 200 bp, more than 300 bp, more than 400 bp, more than 500 bp, more than 600 bp, more than 700 bp, more than 800 bp, more than 900 bp or more than 1000 bp away from a gene transcript start site. In a preferred embodiment, the at least one promoter may be an unannotated promoter that may be positioned more than 500 bp away from a gene transcript start site.

[0089] In another aspect, there is provided a method for modulating the activity of at least one cancer-associated promoter in a cell, comprising administering an inhibitor of EZH2 to the cell. In another aspect there is provided a method for modulating the immune response of a subject to cancer, comprising administering to the subject an inhibitor of EZH2, wherein the EZH2 is associated with at least one cancer-associated promoter in the subject.

[0090] In one embodiment, the inhibitor of EZH2 may modulate the expression of immunogenic N-terminal peptides.

[0091] In one embodiment, the at least one cancer-associated promoter may be an alternative promoter that may be associated with a canonical promoter, wherein the canonical promoter may be present in both a cancerous sample and a non-cancerous sample, and i) wherein the alternative promoter may only be present in a cancerous sample, or ii) wherein the alternative promoter may only be absent in a cancerous sample.

[0092] In one embodiment, the alternative promoter is associated with a transcript variant, and wherein the transcript variant encodes a N-terminal protein variant.

[0093] In one embodiment, the N-terminal protein variant may be an N-terminal truncated protein or an N-terminal elongated protein. In one embodiment, the inhibitor of EZH2 may be a siRNA or a small molecule.

[0094] In one embodiment, the inhibitor of EZH2 may be GSK126.

[0095] In another aspect, there is provided use of an inhibitor of EZH2 in the manufacture of a medicament for modulating the activity of at least one cancer-associated promoter in a cell.

[0096] In another aspect there is provided use of an inhibitor of EZH2, wherein the EZH2 is associated with at least one cancer-associated promoter in the subject, in the manufacture of a medicament for modulating the immune response of a subject to cancer.

[0097] In another aspect, there is provided an inhibitor of EZH2 for use in modulating the activity of at least one cancer-associated promoter in a cell. In yet another aspect, there is provided an inhibitor of EZH2 for use in modulating the immune response of a subject to cancer, wherein the EZH2 is associated with at least one cancer-associated promoter in the subject.

[0098] In another aspect there is provided a method for determining the presence or absence of at least one cancer-associated promoter in a cancerous biological sample relative to a non-cancerous biological sample. The method comprises: contacting the cancerous biological sample with antibodies specific for histone modifications H3K4me3 and H3K4me1; isolating nucleic acid from the cancerous biological sample having a signal ratio of H3K4me3 relative to H3K4me1 greater than 1, wherein the isolated nucleic acid comprises regions specific to said histone modifications; detecting a signal intensity of H3K4me3 in the isolated nucleic acid at a read depth of 20M; and determining the presence or absence of at least one cancer-associated promoter in the cancerous biological sample based on the change in the signal intensity of H3K4me3 relative to the signal intensity of H3K4me3 in a non-cancerous biological sample.

### EXPERIMENTAL SECTION

[0099] Methods and Materials

[0100] Primary Tissue Samples and Cell Lines

[0101] Primary patient samples were obtained from the SingHealth tissue repository with approvals from institutional research ethics review committees and signed patient informed consent. ‘Normal’ (non-malignant) samples used in this study refers to samples harvested from the stomach, from sites distant from the tumour and exhibiting no visible evidence of tumour or intestinal metaplasia/dysplasia upon surgical assessment. Tumor samples were confirmed by cryosectioning to contain >60% tumor cells. FU97, IM95, MKN7, OCUM1 and RERF-GC-1B cell lines were obtained from the Japan Health Science Research Resource Bank. AGS, KATOIII and SNU16, Hs 1.Int and Hs 738.St/Int gastrointestinal fibroblast lines were obtained from the American Type Culture Collection. NCC-59, NCC-24 and SNU-1967 and SNU-1750 were obtained from the Korean Cell Line Bank. YCC3, YCC7, YCC21, YCC22 were gifts from Yonsei Cancer Centre, South Korea. HFE145 cells were a gift from Dr. Hassan Ashktorab, Howard University. GES-1 cells were a gift from Dr. Alfred Cheng, Chinese University of Hong Kong. Cell line identifies were confirmed by STR DNA profiling using ANSI/ATCC ASN-0002-2011 guidelines. For our study, MKN7 cells, listed as a commonly misidentified cell line by ICLAC (http://iclac.org/databases/cross-contaminations/), exhibited a perfect match (100%) with MKN7 reference profiles in the Japanese Collection of Research Bioresources Cell Bank. All cell lines were negative for mycoplasma contamination as assessed by the MycoAlert™ Mycoplasma Detection Kit (Lonza) and the MycoSensor qPCR Assay Kit (Agilent Technologies). PBMCs from healthy donors were collected under protocol CIRB Ref No. 2010/720/E.

[0102] Nano-ChIPseq

[0103] Nano-ChIP-Seq was performed as described below.

[0104] Primary Tissue and Cell Line Fixation

[0105] Fresh-frozen cancer and normal tissues were dissected using a razor blade in liquid nitrogen to obtain—5 mg sized pieces for each ChIP. Tissue pieces were fixed in 1% formaldehyde/PBS buffer for 10 min at room temperature. Fixation was stopped by addition of glycine to a final concentration of 125 mM. Tissue pieces were washed 3 times with TBSE buffer. For cell lines, 1 million fresh harvested cells were fixed in 1% formaldehyde/medium buffer for 10 minutes (min) at room temperature. Fixation was stopped by addition of glycine to a final concentration of 125 mM. Fixed cells were washed 3 times with TBSE buffer, and centrifuged (5,000 r.p.m., 5 min).

[0106] ChIP

[0107] Pelleted cells and pulverized tissues were lysed in 100 μl 1% SDS lysis buffer and sonicated to 300-500 bp using a Bioruptor (Diagenode). ChIP was performed using the following antibodies: H3K4me3 (07-473, Millipore); H3K4me1 (ab8895, Abcam); H3K27ac (ab4729, Abcam).

[0108] WGA

[0109] After recovery of ChIP and input DNA, whole-genome-amplification was performed using the WGA4 kit (Sigma-Aldrich) and BpmI-WGA primers. Amplified DNAs were purified using PCR purification columns (QIAGEN) and digested with BpmI (New England Biolabs) to remove WGA adapters.

[0110] Library Preparation and Sequencing

[0111] 30 ng of amplified DNA was used for each sequencing library preparation (New England Biolabs). 8 libraries were multiplexed (New England Biolabs) and sequenced on 2 lanes of a Hiseq2500 sequencer (Illumina) to an average depth of 20-30 million reads per library.

[0112] Sequencing reads were trimmed (10 bp from front and back) and mapped against human genome reference hg19 using the Burrows-Wheeler Aligner (BWA) (version 0.6.2) ‘aln’ algorithm. Reading statistics were generated using mapstat from samtools. We filtered reads based on their mapping quality (MAPQ>=10) and used uniquely mapped reads to perform peak calling using CCAT v3.0. We chose a MAPQ value of ≥10 because i) MAPQ≥10 has been previously reported as a reliable value for confident read mapping, ii) MAPQ≥10 has been recommended by the developers of the BWA-algorithm as a suitable threshold for confident mapping, and iii) independent studies comparing various read alignment algorithms have shown that mapping accuracies plateau at a 10-12 MAPQ threshold.

[0113] EZH2 ChIP-seq

[0114] Cells were cross-linked with 1% formaldehyde for 10 minutes at room temperature, and stopped by adding glycine to a final concentration of 0.2M. Chromatin was extracted and sonicated to ˜500 bp fragments. EZH2 antibodies (Catalog #5246, Cell Signaling) were used for chromatin immunoprecipitation (ChIP). 30 ng of ChIPed DNA was used for each sequencing library preparation (New England Biolabs). The library was sequenced on a Hiseq2500 (Illumina). Input DNA from cells prior to immunoprecipitation was used to normalize ChIP-seq peak calling. Prior to sequencing, qPCR was used to verify that positive and negative control ChIP regions were amplified in the linear range. Sequencing reads were mapped against human genome reference hg19 using the Burrows-Wheeler Aligner (BWA) (version 0.7) ‘aln’ algorithm. Reading statistics were generated using mapstat from samtools. We filtered reads based on their mapping quality (MAPQ>=10) and used uniquely mapped reads to perform peak calling using MACS2.

[0115] Quality Control Assessments of Nano-ChIPseq Data

[0116] ChIP Enrichment Assessment

[0117] We assessed ChIP library qualities (H3K27ac, H3K4me3 and H3K4me1) using two different methods. First, we estimated ChIP qualities, particularly H3K27ac and H3K4me3, by interrogating their enrichment levels at annotated promoters of protein-coding genes. Specifically, we computed median read densities of input and input-corrected ChIP signals around the transcription start sites (TSSs, +/−500 bp) of highly expressed protein-coding genes. For each sample, we then compared read density ratios of ChIP over input as a surrogate of data quality, retaining only those samples where the ChIP/input ratio was greater than 2-fold. Using this criteria, all H3K4me3 and H3K27ac samples (GC lines and primary samples) exhibited greater than 2-fold enrichment, indicating successful enrichment. Second, we used CHANCE (ChIp-seq ANalytics and Confidence Estimation), a software for ChIP-seq quality control and protocol optimization that indicates whether a ChIP library shows successful or weak enrichment. CHANCE assessment confirmed that the large majority (81%) of samples in our study exhibited successful enrichment. Quality status of each library, as assessed by both methods, are reported in Table 1.

TABLE 1
Read Mapping statistics of NanoChIP-seq libraries

| | | | | | | | | | | ChIP |
|---|---|---|---|---|---|---|---|---|---|---|
| | | | | | | | | # of | | enrich- |
| | | | | | | | | Peaks | | ment |
| | | | | | | | Total | (FDR | CHANCE | around |
| S. | Patient | | Sample | Library | Histone | Total | Mapped | <5%, | Enrich- | TSS |
| No | No | Group | ID | ID | Modification | Reads | Reads | CCAT) | ment | (>2 Fold) |
| 1 | 1 | N | 2000639 | CHG023 | H3K4Me1 | 116,179,997 | 56,009,114 | 11,438 | successful | yes |
| 2 | 1 | N | 2000639 | CHG079 | H3K4Me3 | 144,760,092 | 45,662,594 | 13,301 | successful | yes |
| 3 | 1 | N | 2000639 | CHG022 | H3K27Ac | 107,005,238 | 47,688,264 | 30,155 | successful | yes |
| 4 | 1 | N | 2000639 | CHG021 | Input | 108,432,681 | 53,434,667 | — | — | — |
| 5 | 1 | T | 2000639 | CHG019 | H3K4Me1 | 139,751,844 | 62,529,719 | 9,133 | successful | yes |
| 6 | 1 | T | 2000639 | CHG078 | H3K4Me3 | 176,761,815 | 52,219,714 | 15,417 | successful | yes |
| 7 | 1 | T | 2000639 | CHG018 | H3K27Ac | 125,811,014 | 56,636,793 | 22,220 | successful | yes |
| 8 | 1 | T | 2000639 | CHG017 | Input | 133,549,980 | 62,465,142 | — | — | — |
| 9 | 2 | N | 2000721 | CHG081 | H3K4Me3 | 123,984,264 | 41,723,243 | 13,046 | successful | yes |
| 10 | 2 | N | 2000721 | CHG031 | H3K4Me1 | 142,898,092 | 61,716,210 | 17,896 | successful | yes |
| 11 | 2 | N | 2000721 | CHG030 | H3K27Ac | 142,881,448 | 56,328,103 | 24,624 | successful | yes |
| 12 | 2 | N | 2000721 | CHG029 | Input | 144,582,591 | 67,254,098 | — | — | — |
| 13 | 2 | T | 2000721 | CHG080 | H3K4Me3 | 128,094,707 | 52,416,345 | 12,751 | successful | yes |
| 14 | 2 | T | 2000721 | CHG026 | H3K27Ac | 132,143,844 | 52,416,345 | 45,274 | successful | yes |
| 15 | 2 | T | 2000721 | CHG027 | H3K4Me1 | 120,824,194 | 54,688,706 | 48,701 | successful | yes |
| 16 | 2 | T | 2000721 | CHG025 | Input | 150,621,523 | 65,242,401 | — | — | — |
| 17 | 3 | N | 2000986 | CHG083 | H3K4Me3 | 145,813,278 | 44,476,466 | 13,305 | successful | yes |
| 18 | 3 | N | 2000986 | CHG039 | H3K4Me1 | 112,190,461 | 52,061,916 | 14,977 | successful | yes |
| 19 | 3 | N | 2000986 | CHG038 | H3K27Ac | 136,195,033 | 47,671,991 | 26,993 | successful | yes |
| 20 | 3 | N | 2000986 | CHG037 | Input | 125,858,642 | 58,503,831 | — | — | — |
| 21 | 3 | T | 2000986 | CHG082 | H3K4Me3 | 199,735,230 | 48,070,517 | 13,296 | successful | yes |
| 22 | 3 | T | 2000986 | CHG035 | H3K4Me1 | 99,757,592 | 48,602,649 | 25,882 | successful | yes |
| 23 | 3 | T | 2000986 | CHG034 | H3K27Ac | 127,564,120 | 45,231,776 | 29,278 | successful | yes |
| 24 | 3 | T | 2000986 | CHG033 | Input | 127,392,001 | 57,846,771 | — | — | — |
| 25 | 4 | N | 980437 | CHG087 | H3K4Me3 | 252,269,976 | 16,106,111 | 6,925 | weak | yes |
| 26 | 4 | N | 980437 | CHG089 | H3K27Ac | 248,399,140 | 21,095,856 | 20,018 | weak | yes |
| 27 | 4 | N | 980437 | CHG086 | input | 223,083,607 | 13,951,728 | — | — | — |
| 28 | 4 | T | 980437 | CHG091 | H3K4Me3 | 254,777,628 | 12,340,257 | 7,007 | weak | yes |
| 29 | 4 | T | 980437 | CHG093 | H3K27Ac | 215,915,787 | 19,054,278 | 48,614 | weak | yes |
| 30 | 4 | T | 980437 | CHG090 | input | 214,007,053 | 18,743,433 | — | — | — |
| 31 | 5 | N | 980097 | CHG097 | H3K27Ac | 254,991,965 | 17,871,717 | 10,566 | weak | yes |
| 32 | 5 | N | 980097 | CHG094 | Input | 248,345,017 | 15,056,998 | — | — | — |
| 33 | 5 | T | 980097 | CHG101 | H3K27Ac | 254,857,885 | 16,050,861 | 81,607 | successful | yes |
| 34 | 5 | T | 980097 | CHG098 | Input | 235,148,448 | 16,412,565 | — | — | — |
| 35 | 6 | N | 990068 | CHG441 | H3K4Me3 | 25,942,766 | 18,661,944 | 9,040 | successful | yes |
| 36 | 6 | N | 990068 | CHG443 | H3K27Ac | 28,993,775 | 20,404,671 | 30,306 | successful | yes |
| 37 | 6 | N | 990068 | CHG444 | Input | 16,583,307 | 14,164,125 | — | — | — |
| 38 | 6 | T | 990068 | CHG437 | H3K4Me3 | 19,295,687 | 15,981,638 | 23,546 | successful | yes |
| 39 | 6 | T | 990068 | CHG439 | H3K27Ac | 30,394,067 | 26,279,884 | 84,958 | successful | yes |
| 40 | 6 | T | 990068 | CHG440 | Input | 54,957,058 | 46,535,339 | — | — | — |
| 41 | 7 | N | 2000085 | CHG449 | H3K4Me3 | 22,207,074 | 17,120,624 | 13,421 | weak | yes |
| 42 | 7 | N | 2000085 | CHG451 | H3K27Ac | 31,752,518 | 26,505,029 | 93,432 | successful | yes |
| 43 | 7 | N | 2000085 | CHG452 | Input | 23,861,825 | 20,188,881 | — | — | — |
| 44 | 7 | T | 2000085 | CHG445 | H3K4Me3 | 27,386,842 | 17,898,292 | 16,274 | successful | yes |
| 45 | 7 | T | 2000085 | CHG447 | H3K27Ac | 37,833,126 | 29,893,873 | 67,464 | successful | yes |
| 46 | 7 | T | 2000085 | CHG448 | Input | 25,476,868 | 21,590,215 | — | — | — |
| 47 | 8 | N | 980401 | GCC005 | H3K4Me3 | 47,143,397 | 32,011,124 | 9,739 | weak | yes |
| 48 | 8 | N | 980401 | GCC006 | H3K4Me1 | 49,813,057 | 38,517,830 | 29,304 | successful | yes |
| 49 | 8 | N | 980401 | GCC007 | H3K27Ac | 49,333,955 | 34,378,734 | 104,483 | successful | yes |
| 50 | 8 | N | 980401 | GCC008 | Input | 48,654,609 | 39,027,473 | — | — | — |
| 51 | 8 | T | 980401 | GCC002 | H3K4Me1 | 46,014,858 | 35,781,553 | 5,374 | weak | yes |
| 52 | 8 | T | 980401 | GCC001 | H3K4Me3 | 40,037,248 | 16,724,980 | 11,773 | successful | yes |
| 53 | 8 | T | 980401 | GCC003 | H3K27Ac | 70,844,500 | 51,841,868 | 108,169 | successful | yes |
| 54 | 8 | T | 980401 | GCC004 | Input | 55,650,648 | 46,769,330 | — | — | — |
| 55 | 9 | N | 980447 | GCC013 | H3K4Me3 | 49,510,760 | 43,302,748 | 10,442 | successful | yes |
| 56 | 9 | N | 980447 | GCC014 | H3K4Me1 | 51,911,778 | 46,524,450 | 18,916 | weak | yes |
| 57 | 9 | N | 980447 | GCC015 | H3K27Ac | 43,725,655 | 38,581,698 | 147,189 | successful | yes |
| 58 | 9 | N | 980447 | GCC016 | Input | 43,722,729 | 36,570,838 | — | — | — |
| 59 | 9 | T | 980447 | GCC010 | H3K4Me1 | 51,224,701 | 40,643,956 | 7,959 | successful | yes |
| 60 | 9 | T | 980447 | GCC009 | H3K4Me3 | 41,895,137 | 28,002,598 | 9,325 | weak | yes |
| 61 | 9 | T | 980447 | GCC011 | H3K27Ac | 75,243,898 | 63,172,397 | 98,169 | successful | yes |
| 62 | 9 | T | 980447 | GCC012 | Input | 40,502,678 | 33,280,117 | — | — | — |
| 63 | 10 | N | 2001206 | GCC021 | H3K4Me3 | 42,094,067 | 35,485,202 | 12,682 | successful | yes |
| 64 | 10 | N | 2001206 | GCC022 | H3K4Me1 | 44,213,793 | 38,760,554 | 50,615 | weak | yes |
| 65 | 10 | N | 2001206 | GCC023 | H3K27Ac | 47,356,714 | 34,355,781 | 112,565 | successful | yes |
| 66 | 10 | N | 2001206 | GCC024 | Input | 58,885,884 | 49,927,340 | — | — | — |
| 67 | 10 | T | 2001206 | GCC017 | H3K4Me3 | 48,193,228 | 36,729,294 | 13,835 | successful | yes |
| 68 | 10 | T | 2001206 | GCC018 | H3K4Me1 | 43,730,845 | 35,480,758 | 44,504 | weak | yes |
| 69 | 10 | T | 2001206 | GCC019 | H3K27Ac | 52,518,766 | 42,398,517 | 111,758 | successful | yes |
| 70 | 10 | T | 2001206 | GCC020 | Input | 81,949,870 | 70,380,385 | — | — | — |
| 71 | 11 | N | 980436 | GCC029 | H3K4Me3 | 27,612,232 | 20,121,957 | 12,398 | weak | yes |
| 72 | 11 | N | 980436 | GCC030 | H3K4Me1 | 22,983,565 | 20,452,059 | 53,077 | weak | yes |
| 73 | 11 | N | 980436 | GCC031 | H3K27Ac | 23,061,305 | 15,315,483 | 104,880 | successful | yes |
| 74 | 11 | N | 980436 | GCC032 | Input | 24,411,542 | 21,182,579 | — | — | — |
| 75 | 11 | T | 980436 | GCC025 | H3K4Me3 | 31,564,679 | 24,866,375 | 8,625 | weak | yes |
| 76 | 11 | T | 980436 | GCC026 | H3K4Me1 | 51,645,661 | 38,028,800 | 58,456 | successful | yes |
| 77 | 11 | T | 980436 | GCC027 | H3K27Ac | 51,093,256 | 35,496,776 | 102,351 | successful | yes |
| 78 | 11 | T | 980436 | GCC028 | Input | 25,606,490 | 20,820,223 | — | — | — |
| 79 | 12 | N | 980417 | GCC037 | H3K4Me3 | 18,976,505 | 15,277,228 | 10,387 | successful | yes |
| 80 | 12 | N | 980417 | GCC039 | H3K27Ac | 30,443,642 | 25,447,390 | 70,910 | successful | yes |
| 81 | 12 | N | 980417 | GCC038 | H3K4Me1 | 22,127,416 | 18,537,610 | 109,119 | successful | yes |
| 82 | 12 | N | 980417 | GCC040 | Input | 33,758,416 | 28,242,473 | — | — | — |
| 83 | 12 | T | 980417 | GCC033 | H3K4Me3 | 42,615,610 | 27,972,601 | 10,260 | successful | yes |
| 84 | 12 | T | 980417 | GCC035 | H3K27Ac | 33,438,272 | 29,141,996 | 76,369 | successful | yes |
| 85 | 12 | T | 980417 | GCC034 | H3K4Me1 | 31,115,402 | 26,172,044 | 142,635 | weak | yes |
| 86 | 12 | T | 980417 | GCC036 | Input | 26,806,807 | 22,277,771 | — | — | — |
| 87 | 13 | N | 980319 | GCC075 | H3K4Me3 | 34,503,108 | 26,201,666 | 9,466 | successful | yes |
| 88 | 13 | N | 980319 | GCC076 | H3K4Me1 | 32,308,832 | 28,194,660 | 56,964 | weak | yes |
| 89 | 13 | N | 980319 | GCC077 | H3K27Ac | 28,534,828 | 24,595,902 | 73,073 | successful | yes |
| 90 | 13 | N | 980319 | GCC078 | Input | 31,533,287 | 26,147,884 | — | — | — |
| 91 | 13 | T | 980319 | GCC071 | H3K4Me3 | 31,707,599 | 22,793,555 | 14,049 | succesful | yes |
| 92 | 13 | T | 980319 | GCC073 | H3K27Ac | 42,548,744 | 35,755,479 | 102,971 | successful | yes |
| 93 | 13 | T | 980319 | GCC072 | H3K4Me1 | 28,112,304 | 24,361,418 | 196,347 | weak | yes |
| 94 | 13 | T | 980319 | GCC074 | Input | 28,895,896 | 24,529,014 | — | — | — |
| 95 | 14 | N | 990275 | GCC088 | H3K4Me3 | 39,968,810 | 31,536,231 | 7,964 | successful | yes |
| 96 | 14 | N | 990275 | GCC089 | H3K27Ac | 52,738,627 | 22,089,449 | 70,246 | successful | yes |
| 97 | 14 | N | 990275 | GCC090 | Input | 33,342,252 | 21,049,309 | — | — | — |
| 98 | 14 | T | 990275 | GCC085 | H3K4Me3 | 26,399,904 | 14,795,436 | 25,423 | weak | yes |
| 99 | 14 | T | 990275 | GCC086 | H3K27Ac | 45,712,891 | 25,668,453 | 183,458 | successful | yes |
| 100 | 14 | T | 990275 | GCC087 | Input | 40,285,061 | 32,790,063 | — | — | — |
| 101 | 15 | N | 2000877 | GCC082 | H3K4Me3 | 52,151,546 | 22,229,998 | 11,368 | successful | yes |
| 102 | 15 | N | 2000877 | GCC083 | H3K27Ac | 45,775,899 | 41,027,897 | 61,175 | weak | yes |
| 103 | 15 | N | 2000877 | GCC084 | Input | 38,226,148 | 30,117,584 | — | — | — |
| 104 | 15 | T | 2000877 | GCC079 | H3K4Me3 | 49,368,282 | 24,022,463 | 9,837 | successful | yes |
| 105 | 15 | T | 2000877 | GCC080 | H3K27Ac | 38,621,705 | 33,990,267 | 41,048 | successful | yes |
| 106 | 15 | T | 2000877 | GCC081 | Input | 38,824,621 | 32,814,299 | — | — | — |
| 107 | 16 | N | 20020720 | GCC100 | H3K4Me3 | 58,679,413 | 34,278,884 | 9,901 | successful | yes |
| 108 | 16 | N | 20020720 | GCC101 | H3K27Ac | 43,532,496 | 37,750,917 | 65,167 | successful | yes |
| 109 | 16 | N | 20020720 | GCC102 | Input | 39,544,734 | 31,454,551 | — | — | — |
| 110 | 16 | T | 20020720 | GCC097 | H3K4Me3 | 57,599,648 | 16,022,427 | 12,922 | successful | yes |
| 111 | 16 | T | 20020720 | GCC098 | H3K27Ac | 35,400,105 | 29,507,542 | 74,115 | successful | yes |
| 112 | 16 | T | 20020720 | GCC099 | Input | 37,092,424 | 29,452,932 | — | — | — |
| 113 | 17 | N | 20021007 | GCC094 | H3K4Me3 | 56,788,147 | 18,217,449 | 16,073 | successful | yes |
| 114 | 17 | N | 20021007 | GCC095 | H3K27Ac | 40,488,514 | 33,372,754 | 122,851 | successful | yes |
| 115 | 17 | N | 20021007 | GCC096 | Input | 40,712,616 | 34,440,613 | — | — | — |
| 116 | 17 | T | 20021007 | GCC091 | H3K4Me3 | 33,903,211 | 27,230,052 | 7,843 | weak | yes |
| 117 | 17 | T | 20021007 | GCC092 | H3K27Ac | 50,268,912 | 19,156,361 | 98,104 | successful | yes |
| 118 | 17 | T | 20021007 | GCC093 | Input | 34,936,961 | 29,417,989 | — | — | — |
| 119 | CL1 | FU97 | FU97 | GCC043 | H3K27Ac | 30,087,131 | 22,566,178 | 21,867 | successful | yes |
| 120 | CL1 | FU97 | FU97 | GCC041 | H3K4Me3 | 26,986,288 | 23,243,556 | 26,562 | successful | yes |
| 121 | CL1 | FU97 | FU97 | GCC045 | Input | 33,566,067 | 23,430,741 | — | — | — |
| 122 | CL10 | RERF- | RERF- | CHG374 | H3K27Ac | 39,882,820 | 19,500,590 | 11,201 | successful | yes |
| | | GC-1B | GC-1B | | | | | | | |
| 123 | CL10 | RERF- | RERF- | CHG371 | H3K4Me3 | 42,450,431 | 25,988,948 | 16,625 | successful | yes |
| | | GC-1B | GC-1B | | | | | | | |
| 124 | CL10 | RERF- | RERF- | CHG376 | Input | 21,437,700 | 16,948,709 | — | — | — |
| | | GC-1B | GC-1B | | | | | | | |
| 125 | CL11 | SNU16 | SNU16 | CHG236 | H3K27Ac | 21,726,635 | 16,967,938 | 13,619 | successful | yes |
| 126 | CL11 | SNU16 | SNU16 | CHG233 | H3K4Me3 | 20,136,058 | 18,151,002 | 19,445 | successful | yes |
| 127 | CL11 | SNU16 | SNU16 | CHG232 | Input | 19,522,181 | 14,558,761 | — | — | — |
| 128 | CL12 | SNU1750 | SNU1750 | CHG230 | H3K27Ac | 18,716,777 | 15,805,037 | 15,074 | successful | yes |
| 129 | CL12 | SNU1750 | SNU1750 | CHG227 | H3K4Me3 | 16,655,044 | 14,883,880 | 18,130 | successful | yes |
| 130 | CL12 | SNU1750 | SNU1750 | CHG226 | Input | 19,602,424 | 13,575,272 | — | — | — |
| 131 | CL13 | YCC21 | YCC21 | CHG429 | H3K27Ac | 22,884,268 | 13,861,557 | 21,415 | successful | yes |
| 132 | CL13 | YCC21 | YCC21 | CHG427 | H3K4Me3 | 22,788,225 | 15,669,142 | 20,120 | successful | yes |
| 133 | CL13 | YCC21 | YCC21 | CHG431 | Input | 40,378,916 | 34,747,778 | — | — | — |
| 134 | CL13 | YCC22 | YCC22 | GCC063 | H3K27Ac | 33,314,935 | 23,877,905 | 11,774 | successful | yes |
| 135 | CL13 | YCC22 | YCC22 | GCC061 | H3K4Me3 | 27,410,298 | 24,163,717 | 25,417 | successful | yes |
| 136 | CL13 | YCC22 | YCC22 | GCC065 | Input | 26,685,596 | 18,976,555 | — | — | — |
| 137 | CL14 | YCC3 | YCC3 | GCC053 | H3K27Ac | 27,581,400 | 21,579,098 | 14,118 | successful | yes |
| 138 | CL14 | YCC3 | YCC3 | GCC051 | H3K4Me3 | 22,106,259 | 18,914,296 | 17,276 | success | yes |
| 139 | CL14 | YCC3 | YCC3 | GCC055 | Input | 27,745,993 | 18,854,658 | — | — | — |
| 140 | CL15 | YCC7 | YCC7 | CHG424 | H3K27Ac | 38,599,550 | 22,445,268 | 32,770 | successful | yes |
| 141 | CL15 | YCC7 | YCC7 | CHG422 | H3K4Me3 | 19,594,480 | 14,546,474 | 22,521 | successful | yes |
| 142 | CL15 | YCC7 | YCC7 | CHG426 | Input | 24,527,190 | 21,748,808 | — | — | — |
| 143 | CL2 | HFE145 | HFE145 | CHG245 | H3K4Me3 | 24,122,708 | 19,760,850 | 18,492 | successful | yes |
| 144 | CL2 | HFE145 | HFE145 | CHG244 | Input | 22,447,791 | 17,960,470 | — | — | — |
| 145 | CL2 | HFE145 | HFE145 | HFE145- | H3K4Me3 | 50,701,700 | 45,821,209 | 17,299 | weak | — |
| | | | | EZH2- | | | | | | |
| | | | | MJ-5246 | | | | | | |
| 146 | CL2 | HFE145 | HFE145 | HFE145- | Input | 36,885,332 | 36,157,452 | — | — | — |
| | | | | input-MJ | | | | | | |
| 147 | CL3 | Hs1.Int | Hs1.Int | HsInt- | H3K4Me3 | 37,088,221 | 32,789,363 | 22,518 | successful | — |
| | | | | K4me3. | | | | | | |
| | | | | merged | | | | | | |
| 148 | CL3 | Hs1.Int | Hs1.Int | HsInt-G- | H3K4Me3 | 30,617,105 | 27,713,302 | 20,298 | successful | — |
| | | | (replicate) | K4me3. | | | | | | |
| | | | | merged | | | | | | |
| 149 | CL3 | Hs1.Int | Hs1.Int | HsInt- | Input | 32,275,816 | 28,576,200 | — | — | — |
| | | | | input. | | | | | | |
| | | | | merged | | | | | | |
| 150 | CL4 | Hs738. | Hs738. | Hs738- | H3K4Me3 | 37,945,394 | 33,334,651 | 150,552 | successful | — |
| | | St/Int | St/Int | K4me3. | | | | | | |
| | | | | merged | | | | | | |
| 151 | CL4 | Hs738. | Hs738.St/ | Hs738- | Input | 32,275,816 | 24,581,922 | — | — | — |
| | | St/Int | Int | K4me3. | | | | | | |
| | | | | merged | | | | | | |
| 152 | CL5 | IM95 | IM95 | CHG434 | H3K27Ac | 23,309,435 | 9,168,213 | 27,692 | successful | yes |
| 153 | CL5 | IM95 | IM95 | CHG432 | H3K4Me3 | 25,179,506 | 14,069,213 | 19,956 | successful | yes |
| 154 | CL5 | IM95 | IM95 | CHG436 | Input | 37,968,519 | 33,292,944 | — | — | — |
| 155 | CL6 | KATO3 | KATO3 | CHG242 | H3K27Ac | 24,559,532 | 17,356,721 | 28,730 | successful | yes |
| 156 | CL6 | KATO3 | KATO3 | CHG238 | Input | 20,527,352 | 14,593,025 | — | — | — |
| 157 | CL7 | MKN7 | MKN7 | CHG419 | H3K27Ac | 35,301,333 | 30,804,178 | 24,268 | successful | yes |
| 158 | CL7 | MKN7 | MKN7 | CHG417 | H3K4Me3 | 28,119,400 | 24,793,006 | 23,766 | successful | yes |
| 159 | CL7 | MKN7 | MKN7 | CHG421 | Input | 35,839,896 | 31,791,610 | — | — | — |
| 160 | CL8 | NCC59 | NCC59 | CHG218 | H3K27Ac | 22,973,156 | 19,828,610 | 14,937 | successful | yes |
| 161 | CL8 | NCC59 | NCC59 | CHG215 | H3K4Me3 | 15,642,441 | 13,907,147 | 12,410 | successful | yes |
| 162 | CL8 | NCC59 | NCC59 | CHG214 | Input | 17,926,188 | 13,139,789 | — | — | — |
| 163 | CL9 | OCUM1 | OCUM1 | CHG212 | H3K27Ac | 24,573,737 | 20,570,185 | 17,284 | successful | yes |
| 164 | CL9 | OCUM1 | OCUM1 | CHG209 | H3K4Me3 | 19,557,872 | 17,178,274 | 15,445 | successful | yes |
| 165 | CL9 | OCUM1 | OCUM1 | CHG208 | Input | 20,585,679 | 16,680,529 | — | — | — |

[0118] Promoter Analysis

[0119] Promoter (H3K4Me3 hi/H3K4Me1 lo) regions were identified by calculating the H3K4Me3:H3K4Me1 ratio for all H3K4Me3 regions merged across normal and GC samples. We estimated the required sample size to achieve 80% power and 10% type I error (http://powerandsamplesize.com/) based on the average signals of top 100 differential promoters between tumor and normal samples. This result yielded a recommended sample size of 11 (average), which is met in our study (16 N/T). Regions with H3K4Me3:H3K4Me1 ratios <1 in both normal and GC samples were excluded from further analysis. For all analyses performed in this study, promoter regions were defined as genomic locations exhibiting H3K4me3 hi/me1 low signals, and for all subsequent analyses, it was only within this pre-defined H3K4me3 hi/me1 low subset that H3K4me3 signals were compared. H3K27ac data was used for correlative analysis. H3K4me3 data (fastqs) for colon carcinoma lines was downloaded from public databases—Hct116 and Caco2 from ENCODE and V503 and V400 from GSE36204. To compare promoter signals between GC and normal samples, we used the DESeq2 and edgeR bioconductor packages using a read count matrix of chipseq signals, adjusting for replicate information. Regions with fold changes greater than 1.5 (FDR 0.1) were selected as significantly different. The criteria of FC 1.5 and q<0.1 was based on previous literature comparing ChIP-seq profiles using DESeq2 and edgeR also using similar thresholds. Significantly altered promoters identified by DESeq2 overlapped almost completely with altered promoters found by edgeR. A regularized log transformation of the DESeq2 read counts was used to plot PCAs and heatmaps.

[0120] Transcriptome Analysis

[0121] RNA-seq data was obtained from the European Genome-phenome Archive under Accession No: EGAS00001001128. Data was processed by first aligning to GENCODE v19 transcript annotations using TopHat v2.0.12. Cufflinks 2.2.0 was used to generate FPKM abundance measures. For identification of novel transcripts, Cufflinks was used without employing a reference transcript annotation. Transcripts were then merged across all GC and normal samples and compared against GENCODE annotations to identify novel transcripts using Cuffmerge 2.2.0. Deep-depth strand-specific RNA sequencing was also performed on 10 additional primary samples. Total RNA was extracted using the Qiagen RNeasy Mini kit, and RNA-seq libraries were constructed according to manufacturer's instructions using Illumina Stranded Total RNA Sample Prep Kit v2 (Illumina, San Diego, Calif., USA) Ribo-Zero Gold option (Epicentre, Madison, Wis., USA), and 1 ug total RNA. Sequencing was performed using the paired-end 101 bp read option. TCGA datasets were downloaded from TCGA Data Portal (https://tcga-data.nci.nih.gov/tcga) in form of fastq files which were then aligned to GENCODE v19 transcript annotations using TopHat v2.0.12. To analyze promoter-associated RNA expression, RNA-seq reads from TCGA samples (tumors and normals) were mapped against the genomic locations of promoter regions originally defined by epigenomic profiling in the discovery samples, including all promoters, gained somatic promoters, and lost somatic promoters (see FIG. 1 in Main Text). RNA-seq reads mapping to these epigenome-defined promoter regions were then quantified, normalized by promoter length (kilobases) and by total library size, and fold changes in expression were computed between tumor and normal TCGA sample groups. Length of promoter loci was defined as the number of base pairs (bps) between the start and stop genomic coordinate of the H3K4me3 region as identified by the peak caller program CCAT v3.0. (190) Isoform level quantification for alternative promoter driven transcripts was performed using cufflinks (FPKM), Kallisto (TPM) and MISO (isoform centric analysis). Assigned counts for each isoform were normalized by DESeq2.

[0122] DNA Methylation Analysis

[0123] Genomic DNA of gastric tumors and matched normal gastric tissues was extracted (QIAGEN) and processed for DNA methylation profiling using Illumina HumanMethylation450 BeadChips (HM450). Methylation β-values were calculated and background corrected using the methylumi R BioConductor package. Normalization was performed using the BMIQ method (wateRmelon package in R). CpG island locations were downloaded from the UCSC genome browser. Overlaps of at least 1 bp between promoter loci and CpG islands were identified using BEDTools intersect. For each group (all promoters, gained somatic promoters and lost somatic promoters), we identified probes overlapping the predicted promoter regions and calculated average beta value differences. A two-sample Wilcoxon test was performed.

[0124] Survival Analysis

[0125] Kaplan-Meier survival analysis was used with overall survival as the outcome metric. Log-rank tests were used to assess the significance of the Kaplan-Meier analysis.

[0126] Gene Set Enrichment Analysis

[0127] Gene set enrichment analysis was performed using MsigDB by computing the overlap of genes associated with somatic promoters against the C2 set of curated genes.

[0128] Mass Spectrometry and Data Analysis

[0129] Peptide level mass spectrometry data for 90 colon and rectal cancer (CRC) samples and 60 normal colon epithelium samples were downloaded from the CPTAC portal generated by the Clinical Proteomic Tumor Analysis Consortium (NCl/NIH). (https://cptac-data-portal.georgetown.edu/cptac). Spectral counts were extracted using IDPicker's idQuery tool. Differentially expressed peptides were identified by fitting a linear model (limma R) on quantile normalized and log₂ transformed spectral counts. For GC cell line mass spectrometry, AGS, GES-1, SNU1750 and MKN1 cells were extracted with RIPA buffer supplemented with protease inhibitor. 150 μg protein extract of each biological quadruplicate (i.e. 4 replicates per cell line) were separated on a 12% NuPAGE Novel Bis-Tris precast gel (Thermo Scientific). For in-gel digestion, samples were separated into two fractions and reduced in 10 mM DTT for 1 h at 56° C. followed by alkylation with 55 mM iodoacetamide (Sigma) for 45 min in the dark. Tryptic digests were performed in 50 mM ammonium bicarbonate buffer with 2 μg trypsin (Promega) at 37° C. overnight. Peptides were desalted on StageTips and analysed by nanoflow liquid chromatography on an EASY-nLC 1200 system coupled to a Q Exactive HF mass spectrometer (Thermo Fisher Scientific). Peptides were separated on a C18-reversed phase column (25 cm long, 75 μm inner diameter) packed in-house with ReproSil-Pur C18-QAQ 1.9 μm resin (Dr Maisch). The column was mounted on an Easy Flex Nano Source and temperature controlled by a column oven (Sonation) at 40° C. A 225-min gradient from 2 to 40% acetonitrile in 0.5% formic acid at a flow of 225 nl/min was used. Spray voltage was set to 2.4 kV. The Q Exactive HF was operated with a TOP20 MS/MS spectra acquisition method per MS full scan. MS scans were conducted with 60,000 and MS/MS scans with 15,000 resolution. For data analysis, raw files were processed with MaxQuant version 1.5.2.8 against the UNIPROT annotated human protein database. Carbamidomethylation was set as a fixed modification while methionine oxidation and protein N-acetylation were considered as variable modifications. Search results were processed with MaxQuant filtered with a false discovery rate of 0.01. The match between run option and LFQ quantitation were activated. LFQ intensities were filtered for potential contaminants, reverse proteins and logₑ transformed. They were then imputed using open source software Perseus (0.5 width, 1.8 downshift) and fitted using linear models (limma R).

[0130] 5′ RACE and Gene Cloning

[0131] 5′ Rapid amplification of cDNA ends (5′ RACE) was performed using the 5′ RACE System for Rapid Amplification of cDNA Ends, Version 2 (Invitrogen, 18374-058). Briefly, 2 μg of total RNA was used for each reverse transcription reaction with SuperScript™ II reverse transcriptase and gene-specific primer 1 for each gene. After cDNA synthesis, RNase mix (RNase H and RNase T1) was used to degrade the RNA. First strand cDNAs were then purified with S.N.A.P. columns, and tailed with dCTP and TdT. dC-tailed cDNAs were amplified using the abridged anchor primer and nested gene-specific primer 2 by Go Taq®Hot Start Polymerase (Promega, M5001). Subsequently, primary PCR products were reamplified with the abridged universal amplification primer (AUAP), and gene-specific primer 3. Gel electrophoresis was performed. PCR bands of interest were excised and purified for cloning with the TA Cloning Kit (Invitrogen, K2020). A minimum of 12 independent colonies were isolated, and purified plasmid DNA was sequenced bi-directionally on an ABI 3730 DNA analyzer (Applied Biosystems) (Table 2). Constructs for MET transcripts were generated by PCR amplification of full-length cDNAs encoding wild type and variant MET from KATOIII cells. Wild type and variant RASA3 full-length transcripts were PCR amplified from NCC59 cells. cDNA fragments were cloned into the pCI-Puro-HA vector (modified from Promega's pCI-Neo vector, a gift from Wanjin Hong, Institute of Molecular and Cell Biology, Singapore). Plasmids were transiently transfected into cell lines using Lipofectamine 3000 (Thermo Scientific).

TABLE 2
RACE Primers

| | Gene | Gene | Gene |
|---|---|---|---|
| | specific | specific | specific |
| Gene | primer 1 | primer 2 | primer 3 |
| RASA3 | 5′GGAGTAGATACGC | 5′CACAGCCAGTG | 5′CTTCTCCACTG |
| | TCCGT3′ | GCCGCTCAGGTA3′ | CCAGGATGTT3′ |
| | (SEQ ID | (SEQ ID | (SEQ ID |
| | NO: 1837) | NO: 1838) | NO: 1839) |
| MET | 5′TAGGAGAATGTAC | 5′GGAGACACTGG | 5′CGAGAAACCAC |
| | TGTAT 3′ | ATGGGAGTC 3′ | AACCTGCAT3′ |
| | (SEQ ID | (SEQ ID | (SEQ ID |
| | NO: 1840) | NO: 1841) | NO: 1842) |

[0132] Western Blotting

[0133] 3×10⁵ HEK293 cells were seeded and transfected using Lipofectamine 3000 (Thermo Scientific). Cells were serum starved for 16 hours before addition of human HGF (R&D systems, 100 ng/ml) for 0, 15 and 30 minutes, and immediately harvested with cold Triton-X100 Lysis Buffer (50 mM Tris pH 8.0, 150 mM NaCl, 1% Triton X-100) with protease and phosphatase inhibitors (Roche) on ice. Protein concentration was measured by Pierce BCA protein assay (Thermo Scientific). Cell lysates were heated at 95° C. for 10 min in SDS sample buffer and 20 μg of each cell lysate was loaded per well. Proteins were transferred to nitrocellulose membranes. Western blotting was performed by incubating membranes 4 hrs at room temperature with the following antibodies: Met & β-actin (Santa Cruz), p-MET (Y1234/1235 & Y1349), pSTAT3 (S727 & Y705), STAT3, ERK, p-ERK, Gab1, pGab1 (Y627) (Cell Signaling). Membranes were incubated in secondary antibodies at 1:3,000 for 1 hr at room temperature and developed with SuperSignal West Femto Maximum Sensitivity substrate (Thermo Scientific) using ChemiDoc™ MP Imaging System (BIO-RAD). Western blot bands were quantified using Image Lab software (BIO-RAD). Experiments were repeated in triplicate.

[0134] Cell Proliferation Assays

[0135] 3×10³ GES1, SNU1967 and AGS cells were plated into 96-well plates in media with 10% fetal bovine serum and left overnight to attach. The next day (Day 0), cells were transiently transfected with wild-type and variant RASA3 constructs using Lipofectamine 3000 (Thermo Scientific). The amount of the constructs was 40 ng/well for AGS and 100 ng/well for GES1 and SNU1967 cells. Cell proliferation was measured by the WST-8 assay (Cell Counting Kit-8, Dojindo) from 24 to 120 hours post-transfection. 10 uL of WST-8 solution was added per well and the absorbance reading was measured at 450 nm after 2 hours of incubation in a humidified incubator.

[0136] Transfection with RASA3 siRNAs

[0137] Two RASA3 siRNAs were used to silence the RASA3 SomT transcript in NCC24 cells (hs.Ri.RASA3.13.1 TriFECTa® Kit DsiRNA Duplex (Integrated DNA Technologies), and Silencer® Select Pre-Designed siRNA s355 (Life Technologies)). NCC24 cells were transfected either with the above two siRNAs or a non-targeting control (ON-TARGETplus Non-targeting pool, Dharmacon) at a final concentration of 100 nM for 48 hours, subsequently followed by qPCR and western validation and migration/invasion assays.

[0138] Migration and Invasion Assays

[0139] To determine cell migratory capacities, RASA3 wild type and variant transfected AGS and GES1, SNU1967 and AGS, and siRNA treated NCC24 cells were tested using Corning Costar 6.5 mm Transwell with 8.0 μm Pore Polycarbonate Membrane Inserts (3422, Corning, N.Y., USA). 2.5×10⁴ AGS cells and 2×10⁴ GES1 cells, 3×10⁴ SNU1967 cells and 5×10⁴ NCC24 cells were suspended in 0.1 ml serum-free RPMI medium and added to the top of the Transwell insert. 0.6 ml RPMI containing 10% FBS was added into the bottom well as a chemoattractant. After incubation for 24 h at 37° C. in a 5% CO2 incubator, cells were fixed with 3.7% formaldehyde and permeabilized with 100% methanol. Non-migrated cells were scraped off with cotton swabs from the upper surface of the membrane. Migrated cells were stained with 0.5% crystal violet. The number of migrated cells were represented as the total area of migrated cells vs the area of transwell membrane calculated using ImageJ software. For cell invasion assays, the above Transwell inserts were coated with 0.1 ml (300 μg/mL) Corning Matrigel matrix (354234, Corning, N.Y., USA) for 2 to 4 h at 37° C. before use. All subsequent steps were identical to the migration assay protocol.

[0140] Measurement of RASA3 mRNA Levels

[0141] Total RNA was extracted from three independent experiments using the Qiagen RNAeasy mini kit according to manufacturer's instructions. RNA was reverse transcribed using Improm-II™ Reverse Transcriptase (Promega). Real time PCR was performed in triplicate using Quantifast SYBR Green PCR kit (Qiagen) on an Applied Biosystems HT7900 Real Time PCR System. Fold change was calculated using the Delta Ct method and normalised to β-actin. Primer sequences are as follows. β-actin: F-5′ TCCCTGGAGAAGAGCTACG 3′ (SEQ ID NO: 1843), R-5′ GTAGTTTCGTGGATGCCACA 3′ (SEQ ID NO: 1844); RASA3 SomT: F-5′ TTGTGAGTGGTTCAGCGGTA 3′ (SEQ ID NO: 1845), R-5′ TCAAGCGAAACCATCTCTTCT 3′ (SEQ ID NO: 1846).

[0142] RAS-GTP Assay

[0143] GES1 cells were transfected with either RASA3 CanT, RASA3 SomT or empty vector for 48 hours. Cells were harvested for protein in FBS containing media or subjected to over-night serum starvation followed by serum stimulation for 30 minutes prior to harvest. Proteins were extracted using ice-cold lysis buffer (Active RAS Pull-down and Detection Kit) containing protease inhibitor cocktail (Nacalai Tesque). Active RAS fraction was obtained using the Active RAS Pull-down and Detection Kit (Thermo Fisher Scientific) according to manufacturer's instructions. Total RAS was measured in corresponding whole cell protein lysates. B-actin was used as a loading control. Protein concentrations were determined using the Pierce BCA protein assay (Thermo Scientific). SDS sample buffer was added to the lysates and boiled at 100° C. for 5 minutes. Samples were loaded in each well of a 4-15% Mini-Protean TGX gel (Biorad) and transferred to a PVDF membrane using a semi-dry blotting system (Biorad). Membranes were probed with anti-RAS (1 in 200 dilution, supplied in Active RAS Pull-down and Detection Kit), or B-actin (1 in 5000 dilution, Sigma A5316) in 5% milk-PBST at 4° C. over-night. Secondary anti-mouse antibody (LNA931, Amersham) was used at a dilution of 1 in 2000 for 1 hour at room temperature. Membranes were developed using Amersham ECL Prime Western Blotting Detection Reagent and imaged using a Chemidoc Imaging system (Biorad).

[0144] Altered Peptide and Antigen Prediction

[0145] Altered peptides were defined as variant N-terminal protein sequences arising from somatic alterations in alternative promoter usage. The following filters were applied to select the pool of altered peptides—i) Fold change of at least 1.5 for alternate vs. canonical RNA-seq expression ii) Only one canonical and one alternate isoform per gene loci iii) Annotated transcripts are confirmed as protein coding by Gencode. Canonical promoters were defined as regions exhibiting unaltered H3K4me3 peaks. Random peptides from the human proteome were generated from amino acid sequences of Gencode coding transcripts. N-terminal peptide gains were identified as cases where the alternative transcript was associated with a different 5′ region predicted to result in a different translated protein sequence compared to the canonical transcript. For each N terminal altered protein, we evaluated binding of 9-mer peptides using the NetMHCpan 2.8 using a strict threshold of IC<=50 nm to identify strong MHC binders. N-terminal gained peptides were mapped against protein assembly data of the same gene to evaluate protein expression. Antigen predictions were performed against HLA types of 13 GC samples predicted using OptiType. OptiType was run using default parameters except BWA mem was used as an aligner for pre-filtering reads aligning to the Optitype provided reference sequences. 3 samples with poor coverage and unpaired reads with mismatches were omitted from analysis. Eleven HLA-A, HLA-B, and HLA-C allelic variants of increased prevalence in the South East Asian population (HLA-A*02:07/HLA-A*11:01/HLA-A*24:02/HLA-A*33:03/HLA-A*24:07, HLA-B*13:01/HLA-B*40:01/HLA-B*46:01, HLA-C*03:04/HLA-C*07:02/HLA-C*08:01) were obtained from the Allele Frequency Net Database (http://www.allelefrequencies.net).

[0146] Association of Cytolytic Markers with Alternative Promoter Usage

[0147] Local immune cytolytic activity was evaluated using the expression of Granzyme A (GZMA) and Perforin (PRF1). Tumor content was estimated using two algorithms—ASCAT(79) (aberrant cell fraction) and ESTIMATE (tumor purity). Expression data for the SG series was downloaded (GSE15460) and normalized using the robust multi-array average algorithm in the ‘affy’ R package and logₑ transformed. Affymetrix SNP Array 6.0 data for the SG series was downloaded from GSE31168 and GSE85466. Mutation frequencies for TCGA STAD samples were downloaded from the TCGA STAD publication data (https://tcga-data.nci.nih.gov/docs/publications/stad_20140 using level 2 curated MAF files (QCv5_blacklist_Pass.aggregated.capture.tcga.uuid.curated.somatic.maf) filtered for “Missense” variant classification. Expression data for TCGA STAD samples (TPM) was computed using the kallisto algorithm. Raw SNP Array 6.0.CEL files for TCGA gastric cancers (STAD) were downloaded from the GDC data portal (https://gdc-portal.nci.nih.gov/). Access to this dataset was obtained using dbGaP credentials and an ID issued by eRA commons. Precomputed ESTIMATE scores for TCGA STAD were downloaded from http://bioinformatics.mdanderson.org/estimate/and converted to tumor purity using the formula cos (0.6049872018+0.0001467884×ESTIMATE score). Preprocessed expression data for the ACRG series was downloaded from GSE62254, and pre-computed ASCAT scores obtained from collaborators (JL). Expression of cytolytic markers was adjusted for missense mutation and tumor purity frequencies using a spline regression model.

[0148] Peptides and Cells for Cytokine Assays

[0149] A set of peptides for 15 representative alternative promoters was purchased from GenScript (GenScript). Peptide sequences and composition of peptide pools for each alternative promoter are described in Table 3. Control peptide pools for human Actin were purchased from JPT (PM-ACTS, PepMix™ Human (Actin) JPT). Peripheral blood mononuclear cells (PBMCs) were obtained from 9 healthy volunteers of whom 8 PBMC samples were HLA-typed (Table 3).

TABLE 3
HLA types of healthy PBMC donors

| Sample | HLA-A | | HLA-B | | HLA-C | |
|---|---|---|---|---|---|---|
| Donor 1 | A*11:01 | A*24:02 | B*15:01 | B*51:01 | C*04:01 | C*14:02 |
| Donor 2 | A*11:01 | A*33:03 | B*40:01 | B*58:01 | C*03:02 | C*07:02 |
| Donor 3 | A*03:01 | A*33:03 | B*35:03 | B*38:01 | C*12:03 | C*12:03 |
| Donor 4 | A*02:07 | A*24:07 | B*15:02 | B*46:01 | C*01:02 | C*08:01 |
| Donor 5 | A*02:03 | A*11:01 | B*15:02 | B*51:01 | C*08:01 | C*14:02 |
| Donor 6 | A*02:01 | A*68:01 | B*15:13 | B*40:06 | C*08:01 | C*15:02 |
| Donor 7 | A*02:07 | A*33:03 | B*27:04 | B*58:01 | C*03:02 | C*12:02 |
| Donor 8 | A*02:03 | A*11:01 | B*38:02 | B*46:01 | C*01:02 | C*07:02 |

| | |
|---|---|
| Donor 9 | Not determined |

[0150] EpiMAX Assay

[0151] PBMCs were labelled with 1 μM CFSE (Life Technologies, Thermo Fisher Scientific) and cultured at a density of 200,000 cells per well in complete culture medium (cRPMI comprising RPMI 1640 medium (Gibco, Thermo Fisher Scientific), 15 mM HEPES (Gibco), 1% non-essential amino acid (Gibco), 1 mM sodium pyruvate (Gibco), 1% penicillin/streptomycin (Gibco), 2 mM L-glutamine (Gibco), 50 μM β2-mercaptoethanol (Sigma, Merck), and 10% heat-inactivated FCS (Hyclone)) for 5 days. Individual peptide pools of each alternative promoter were added at the start of the culture at a concentration of 1 μg/ml for each peptide. At the end of day 5, cells were stained with LIVE/DEAD® fixable near-IR dead cell stain kit (Life Technologies), and labelled with CD4-BUV737 (BD), CD8-PacificBlue (BD), CD3-PE (BioLegend), CD19-PE/TexasRed (Beckman), and CD56-APC (BD). Analysis of T cell proliferation by CFSE dilution was performed by flow cytometry using a LSRII (BD). In addition, magnetic bead-based cytokine multiplex analysis (human cytokine panel 1, Millipore, Merck) was performed on cell culture supernatants to measure secreted cytokine levels.

[0152] IFN-γ Assay

[0153] To test the immunogenicity of the RASA3 WT and Variant protein sequences, CD14⁺ monocytes were isolated from a HLA-A*02:06 donor by positive selection using magnetic beads (Miltenyi, Germany). Dendritic cells were generated by GM-CSF (1000 IU/ml) and IL-4 (400 IU/ml), and further matured by TNF (10 ng/ml), IL-1b (10 ng/ml), IL-6 (10 ng/ml) (Miltenyi, Germany) and PGE2 (1 μg/ml) (Stemcell Technologies, Canada) for 24 hours. The DCs were then primed with AGS cell lysates expressing WT RASA3 or Variant RASA3 for 24 hours, before being co-cultured with T cells from the same donor at the ratio of 1:5. After 5 days of co-culture with DC, T cells were isolated by positive selection using CD3 magnetic beads (Miltenyi, Germany) and co-cultured with AGS cells expressing either WT or Variant RASA3 at the ratio of 20:1 for two days. Supernatants were harvested and IFN-γ release was measured by ELISA (R&D, USA).

[0154] NanoString Analysis

[0155] Nanostring nCounter Reporter CodeSets were designed for 95 genes (83 upregulated in GC and 11 downregulated) and 5 housekeeping genes (AGPAT1, CLTC, B2M, POL2RL and TBP covering a broad expression range) on the SG series samples. For each gene, we designed 3 probes, targeting a) the 5′ end of the alternate promoter location, b) the 5′ end of the canonical promoter (defined by promoter regions of equal enrichment in both GC and normal samples OR the longest protein coding transcript) and c) a common downstream probe. Vendor-provided nCounter software (nSolver) was used for data analysis. Raw counts were normalized using the geometric mean of the internal positive control probes included in each CodeSet.

[0156] A separate NanoString assay was designed for 88 genes on the ACRG cohort. For each gene, we designed 3 probes, targeting a) the 5′ end of the alternate promoter location, b) the 5′ end of the canonical promoter (defined by promoter regions of equal enrichment in both GC and normal samples OR the longest protein coding transcript).

[0157] Repeat Enrichment Analysis

[0158] Repetitive element families over-represented at regions exhibiting somatic promoter alterations were identified using RepeatMasker annotations from the UCSC Table Browser (GRCh37/hg19). “Unknown”, “Simple_Repeat” and “Satellite” annotations were filtered from the repeat set. Repetitive elements were included only if they overlapped a promoter by a minimum of 50%. Enrichment of repetitive element families was assessed using a binomial test with Benjamini-Hochberg FDR correction and all promoter regions were used as the background.

[0159] Functional Prediction Analysis

[0160] Genome wide and tissue specific functional scores were downloaded from GenoCanyon (http://genocanyon.med.yale.edu/GenoCanyon_Downloads.html, Version 1.0.3) and GenoSkyline (http://genocanyon.med.yale.edu/GenoSkyline) respectively. Overlaps were calculated using bedtools IntersectBed and functional scores over each unannotated somatic promoter were computed.

[0161] Transcription Factor Enrichment

[0162] Transcription factor binding sites for 237 TFs were obtained from the ReMap database, a public database of ENCODE and other public Chip-seq TFBS data sets. Overlaps were calculated and counted against the somatic promoter set. Relative enrichment scores were calculated as ratio of (#bases in state and overlap feature)/(#bases in genome) and [(#bases overlap feature)/(#bases in genome)×(#bases in state)/(#bases in genome)].

[0163] EZH2 Inhibition

[0164] IM95 were treated with GSK126 (Selleck, USA), a selective EZH2 inhibitor, at a concentration of 5 uM. Cell proliferation was monitored in 96-well plates post-treatment with GSK126 using the CellTiter-Glo® Luminescent Cell Viability Assay (Promega) for three independent experiments. For RNA-seq analysis, total RNA was extracted using the Qiagen RNAeasy mini kit according to manufacturer's instructions. Cells were treated with GSK126 (Selleck, USA; dissolved in DMSO) at a concentration of 5 uM. Control cells were treated with the same concentration of DMSO (0.1%). RNAseq differential analysis for promoter loci was carried out using edgeR on read counts mapping to H3K4me3 regions estimated using featureCounts. RNAseq gene level differential analysis was performed using cuffdiff2.2.1.

[0165] Additional Information

[0166] Accession codes: Genomic data for this study has been deposited in the National

[0167] Center for Biotechnology GEO database, under accession numbers GSE51776 and GSE75898. (https://www.ncbi.nlm.nih.gov/geo/query/acc.cgi?token=kfoxqeamzftpal&acc=GSE75898)

[0168] Results

[0169] Identifying Epigenomic Promoter Alterations in GC

[0170] Using NanoChIP-seq, we profiled three histone modification marks (H3K4me3, H3K27ac and H3K4me1) across 17 GCs, matched normal gastric mucosae (34 samples) and 13 GC cell lines, generating 110 epigenomic profiles (Tables 1 and 4 provide clinical and sequencing metrics) (FIG. 1a). Quality control of the Nano-ChIPseq data was performed using two independent methods: ChIP-enrichment at known promoters, and employing the ChIP-seq quality control and validation tool CHANCE (CHip-seq ANalytics and Confidence Estimation). Comparisons of Nano-ChIPseq read densities at 1,000 promoters associated with highly expressed protein-coding genes confirmed successful enrichment in all H3K27ac and H3K4me3 libraries. CHANCE analysis also revealed that the large majority (81%) of samples exhibited successful enrichment (Table 1). We have previously also shown that Nano-ChIP signals exhibit a good concordance with orthogonal ChIP-qPCR results.

TABLE 4
Clinicopathological Parameters of samples used

| | | | | Site | | | | | | | | |
|---|---|---|---|---|---|---|---|---|---|---|---|---|
| Sample | | | | of | Stage | Stage | Stage | Stage | | Lauren's | EBV | TCGA |
| ID | Platform | Age | Gender | Tumor | (T) | (N) | (M) | AJCC7 | Grade | Classification | status | Subtype |
| 20021007 | ChIPseq + | 53.8 | male | GE | T2b | N0 | m0 | 2A | poorly | intestinal type | unknown | GS |
| | Infinium450K | | | junction | | | | | differentiated | adenocarcinoma | | |
| 20020720 | ChIPseq + | 75.2 | male | antrum | T2a | N1 | m0 | 2A | moderately | intestinal type | unknown | CIN |
| | Infinium450K | | | | | | | | differentiated | adenocarcinoma | | |
| 2001206 | ChIPseq + | 64.8 | male | antrum | T4a | N3b | m1 | 4 | poorly | diffuse type | unknown | C!N |
| | Infinium450K | | | | | | | | differentiated | adenocarcinoma | | |
| 2000877 | ChIPseq + | 44.6 | male | cardia | T2a | N1 | m0 | 2A | poorly | intestinal type | unknown | CIN |
| | Infinium450K | | | | | | | | differentiated | adenocarcinoma | | |
| 2000085 | ChIPseq + | 52.6 | male | lesser | T2 | N0 | m0 | 1B | moderately | intestinal type | yes | GS |
| | Infinium450K | | | curve | | | | | differentiated | adenocarcinoma | | |
| 990275 | ChIPseq + | 71.6 | male | lesser | T4a | N0 | m0 | 2B | moderately | intestinal type | no | CIN |
| | Infinium450K | | | curve | | | | | differentiated | adenocarcinoma | | |
| 990068 | ChIPseq + | 73.3 | male | body | T4a | N2 | m0 | 3B | poorly | intestinal type | no | GS |
| | Infinium450K | | | | | | | | differentiated | adenocarcinoma | | |
| 980447 | ChIPseq + | 68.8 | male | lesser | T4a | T3b | m1 | 4 | poorly | intestinal type | unknown | CIN |
| | Infinium450K | | | curve | | | | | differentiated | adenocarcinoma | | |
| 980436 | ChIPseq + | 65.0 | female | lesser | T4a | N1 | m0 | 3A | moderately | intestinal type | unknown | GS |
| | Infinium450K | | | curve | | | | | differentiated | adenocarcinoma | | |
| 980401 | ChIPseq + | 82.9 | female | unknown | T4a | N1 | m0 | 3A | poorly | diffuse type | unknown | GS |
| | Infinium450K | | | | | | | | differentiated | adenocarcinoma | | |
| 980319 | ChIPseq + | 67.8 | male | unknown | T4a | N1 | m0 | 3A | poorly | mixed/ | yes | GS |
| | Infinium450K | | | | | | | | differentiated | OTHERS | | |
| 2000986 | ChIPseq + | 39.0 | female | pylorus | T4a | T3b | m1 | 4 | poorly | diffuse type | unknown | GS |
| | Infinium450K + | | | | | | | | differentiated | adenocarcinoma | | |
| | RNA-seq | | | | | | | | | | | |
| 2000721 | ChIPseq + | 70.9 | male | lesser | T4a | T3b | m1 | 4 | poorly | diffuse type | yes | GS |
| | Infinium450K + | | | curve | | | | | differentiated | adenocarcinoma | | |
| | RNA-seq | | | | | | | | | | | |
| 2000639 | ChIPseq + | 69.5 | male | lesser | T4a | N3a | m1 | 4 | moderately | intestinal type | yes | GS |
| | Infinium450K + | | | curve | | | | | differentiated | adenocarcinoma | | |
| | RNA-seq | | | | | | | | | | | |
| 980437 | ChIPseq + | 67.8 | female | incisura | T4a | T3b | m0 | 3C | poorly | intestinal type | unknown | CIN |
| | Infinium450K + | | | | | | | | differentiated | adenocarcinoma | | |
| | RNA-seq | | | | | | | | | | | |
| 980417 | ChIPseq + | 67.0 | male | lesser | T4a | T3b | m0 | 3C | poorly | diffuse type | yes | GS |
| | Infinium450K + | | | curve | | | | | differentiated | adenocarcinoma | | |
| | RNA-seq | | | | | | | | | | | |
| 980097 | ChIPseq + | 65.4 | male | unknown | T2 | N1 | m0 | 2A | undifferentiated | mixed/ | unknown | EBV |
| | Infinium450K + | | | | | | | | | OTHERS | | |
| | RNA-seq | | | | | | | | | | | |
| 980418 | Infinium450K | 88.0 | male | greater | T4a | N2 | m0 | 3B | moderately | intestinal type | unknown | — |
| | | | | curve | | | | | differentiated | adenocarcinoma | | |
| 57689477 | RNA-seq | 84.5 | female | greater | T1b | N0 | m0 | 1A | moderately | intestinal type | no | — |
| | | | | curve | | | | | differentiated | adenocarcinoma | | |
| 43658255 | RNA-seq | 66.6 | male | antrum | T4a | N3a | m1 | 4 | moderately | intestinal type | unknown | — |
| | | | | | | | | | differentiated | adenocarcinoma | | |
| 2000892 | RNA-seq | 71.3 | female | lesser | T2 | N1 | m0 | 2A | moderately | intestinal type | no | — |
| | | | | curve | | | | | differentiated | adenocarcinoma | | |

[0171] To enable accurate promoter identification, we integrated data from multiple histone modifications, selecting H3K4me3 regions simultaneously co-depleted for H3K4me1⁴² (“H3K4me3 hi/H3K4me1 lo regions”; FIG. 7, Methods). Comparisons against data from external sources, including GENCODE reference transcripts, ENCODE chromatin-state models, and CAGE (CAP analysis gene expression) databases, validated the vast majority of H3K4me3 hi/H3K4me1 lo regions as true promoter elements (see section titled “Validation of H3K4me3 hi/H3K4me1 lo regions as true promoters” and FIG. 7). Because primary gastric tissues comprise several different tissue types, including epithelial cells, immune cells, and stroma, we further confirmed that our promoter profiles were reflective of bona fide gastric epithelia by comparisons against Epigenome Roadmap data for gastric and non-gastric tissues. Gastric tumor and matched normal promoter profiles exhibited the highest correlations to Roadmap gastric mucosae, and were distinct from other gastrointestinal tissues (small intestine, colon mucosa, colon sigmoid), stomach-associated muscle, skin, and blood (CD14) (FIG. 8). Primary tissue promoter profiles also showed a significant overlap with promoter profiles of GC cell lines (87%), which are purely epithelial in origin, compared to gastrointestinal fibroblast lines (58-69%), and colon carcinoma lines (59-74%) (FIG. 8).

[0172] In total, we mapped ˜23,000 promoter elements in the Nano-ChIPseq cohort. Visual exploration of these promoter elements identified three main promoter categories—unaltered promoters, promoters gained in tumors (gained somatic or tumor-specific promoters), and promoters present in normal gastric tissues but lost or decreased in GC (lost somatic or normal-specific promoters) (FIG. 1a-c). Representative examples of unaltered promoters included RhoA (FIG. 1a), while CEACAM6, an intracellular adhesion gene, exhibited somatic promoter gain at the CEACAM6 transcription start site (TSS) in tumor samples and cell lines (FIG. 1b). Conversely, ATP4A, a parietal cell-associated H+/K+ ATPase with decreased expression in GC⁴³, exhibited somatic promoter loss (FIG. 1c). Both CEACAM6 and ATP4A promoter alterations were correlated with increased and decreased CEACAM6 and ATP4A gene expression in the same samples respectively (FIGS. 1b and 1c).

[0173] Previous studies have established distinct molecular subtypes of GC. Due to limited sample sizes however, we elected in the current stay to identify promoter alterations (“somatic promoters”) present in multiple GC tissues relative to control tissues irrespective of subtype. Focusing on recurrent alterations also has the benefit of reducing potential artefacts due to “private” epigenomic variation or individual sample-specific technical errors. Using two complementary read-count based algorithms commonly used for analysis of ChIP-seq data, we identified ˜2000 highly recurrent somatic promoters, of which 75% were gained in GCs (FC 1.5, q<0.1). Two-dimensional heat-map clustering and principal components analysis (PCA) plots based on somatic promoters confirmed a separation of GCs from normal samples based on promoter alterations (FIG. 1d and FIG. 9). Somatic promoter H3K4me3 levels were also highly correlated with H3K27ac signals (r=0.91, P<0.001, FIG. 1e), commonly regarded as a marker of active regulatory activity. This correlation was observed across all somatic promoters (r=0.84, P<0.001, FIG. 1E), and also when gained somatic and lost somatic promoters were analyzed separately (r=0.78, P<0.001 for gained somatic; r=0.82, P<0.001 for lost somatic, FIG. 9). Pathway analysis revealed that both gained somatic and lost somatic promoters were significantly associated with expression genesets previously reported to be up and downregulated in GC respectively (FIG. 10. These included upregulated oncogenes (MET, ABL2), cell adhesion genes (CEACAM6) and claudin family members (CLDN7, CLDN3). 15-18% of somatic promoters mapped to non-coding RNAs (ncRNAs), including HOTAIR and PVT1, previously associated with GC (Table 5). Additional analyses at increasing thresholds of stringency (FC from 1.5-2 and FDR from 0.1-0.001) yielded similar results, supporting the robustness of this analysis (FIG. 9). These results demonstrate that normal gastric epithelia and GCs can be distinguished on the basis of epigenomic promoter profiles.

TABLE 5
Non coding RNAs associated with Altered promoters

| Gene | H3K4Me3 (T/N) |
|---|---|
| AC004158.2 | Gain |
| AC004870.4 | Gain |
| AC005281.1 | Gain |
| AC005550.4 | Gain |
| AC007040.5 | Gain |
| AC007392.3 | Gain |
| AC009229.6 | Gain |
| AC012531.23 | Gain |
| AC016683.6 | Gain |
| AC016995.3 | Gain |
| AC019201.1 | Loss |
| AC068134.6 | Gain |
| AC069277.2 | Gain |
| AC073479.1 | Loss |
| AC079779.4 | Loss |
| AC090051.1 | Loss |
| AC092296.1 | Gain |
| AC092594.1 | Gain |
| AC092635.1 | Loss |
| AC096579.1 | Loss |
| AC096579.13 | Loss |
| AC096579.7 | Loss |
| AC116351.2 | Gain |
| AC128653.1 | Loss |
| AC131951.1 | Loss |
| AC133680.1 | Loss |
| AC140912.1 | Gain |
| AC144521.1 | Gain |
| AF127936.5 | Loss |
| AJ003147.8 | Gain |
| AL031721.1 | Gain |
| AL109618.1 | Gain |
| AL122015.1 | Gain |
| AL122127.1 | Loss |
| AL122127.2 | Loss |
| AL122127.3 | Loss |
| AL122127.4 | Loss |
| AL122127.5 | Loss |
| AL139319.1 | Gain |
| AP000525.9 | Gain |
| AP001065.15 | Gain |
| C11orf95 | Gain |
| C1orf132 | Loss |
| CASC9 | Gain |
| CCAT1 | Gain |
| CECR7 | Loss |
| CT49 | Gain |
| CTB-175P5.4 | Gain |
| CTC-228N24.1 | Gain |
| CTC-276P9.1 | Loss |
| CTC-480C2.1 | Gain |
| CTD-2008P7.9 | Loss |
| CTD-2147F2.1 | Gain |
| CTD-2201E18.5 | Gain |
| CTD-2314B22.1 | Gain |
| CTD-2314B22.3 | Gain |
| CTD-2532K18.1 | Gain |
| CTD-2591A6.2 | Gain |
| FENDRR | Loss |
| FZD10-AS1 | Gain |
| GS1-179L18.1 | Gain |
| GS1-259H13.2 | Gain |
| H19 | Gain |
| hsa-mir-4537 | Loss |
| hsa-mir-4538 | Loss |
| hsa-mir-4539 | Loss |
| JRK | Loss |
| LINC00237 | Gain |
| LINC00278 | Loss |
| LINC00355 | Gain |
| LINC00365 | Loss |
| LINC00393 | Gain |
| LINC00665 | Gain |
| LINC00668 | Gain |
| LINC00669 | Gain |
| LINC00675 | Loss |
| LINC00858 | Gain |
| LINC00898 | Gain |
| LINC00939 | Gain |
| LINC00960 | Gain |
| MIR1184-1 | Gain |
| MIR135B | Gain |
| MIR144 | Loss |
| MIR196B | Gain |
| MIR3147 | Gain |
| MIR3185 | Gain |
| MIR31HG | Loss |
| MIR4488 | Gain |
| MIR4634 | Gain |
| MIR663A | Gain |
| MIR663B | Loss |
| MIR935 | Gain |
| MLLT4-AS1 | Gain |
| PVT1 | Gain |
| RN7SKP258 | Gain |
| RN7SL773P | Gain |
| RNA5S17 | Gain |
| RNA5SP18 | Gain |
| RNA5SP19 | Gain |
| RNA5SP75 | Loss |
| RNU1-92P | Gain |
| RNVU1-10 | Gain |
| RP11-108K3.1 | Gain |
| RP11-138J23.1 | Gain |
| RP11-13A1.1 | Gain |
| RP11-161I10.1 | Gain |
| RP11-163N6.2 | Gain |
| RP11-168L22.2 | Gain |
| RP11-16E12.2 | Loss |
| RP11-177F15.1 | Gain |
| RP11-191L9.4 | Gain |
| RP11-211C9.1 | Gain |
| RP11-229C3.2 | Loss |
| RP11-246A10.1 | Gain |
| RP11-25H12.1 | Gain |
| RP11-276H19.2 | Gain |
| RP11-288G11.3 | Loss |
| RP11-299P2.1 | Loss |
| RP11-2E17.1 | Loss |
| RP11-308B16.2 | Gain |
| RP11-326A19.4 | Gain |
| RP11-346D19.1 | Gain |
| RP11-347D21.4 | Gain |
| RP11-348J24.2 | Gain |
| RP11-351J23.2 | Gain |
| RP11-356J5.12 | Gain |
| RP11-357H14.17 | Gain |
| RP11-371I1.2 | Gain |
| RP11-137D17.1 | Gain |
| RP11-395B7.2 | Gain |
| RP11-3J1.1 | Gain |
| RP11-400N13.2 | Gain |
| RP11-403I13.5 | Gain |
| RP11-408B11.2 | Gain |
| RP11-426L16.8 | Gain |
| RP11-431M3.1 | Loss |
| RP11-434D9.2 | Gain |
| RP11-43F13.4 | Gain |
| RP11-44H4.1 | Gain |
| RP11-44N12.5 | Gain |
| RP11-451B8.1 | Gain |
| RP11- | Gain |
| 453F18_B.1 | |
| RP11-460N16.1 | Gain |
| RP11-469L4.1 | Loss |
| RP11-472N13.2 | Gain |
| RP11-48O20.4 | Loss |
| RP11-499F3.2 | Gain |
| RP11-514D23.1 | Loss |
| RP11-547I7.2 | Gain |
| RP11-575F12.1 | Gain |
| RP11-576D8.4 | Gain |
| RP11-599B13.3 | Loss |
| RP11-608O21.1 | Gain |
| RP11-60A8.1 | Gain |
| RP11-61G19.1 | Gain |
| RP11-626G11.4 | Gain |
| RP11-626H12.1 | Gain |
| RP11-627G23.1 | Loss |
| RP11-632K5.3 | Gain |
| RP11-66B24.2 | Gain |
| RP11-66B24.7 | Gain |
| RP11-689K5.3 | Gain |
| RP1-170O19.14 | Gain |
| RP1-170O19.17 | Gain |
| RP11-776H12.1 | Gain |
| RP11-79P5.7 | Gain |
| RP11-809C18.5 | Gain |
| RP11-81H14.2 | Loss |
| RP11-831A10.2 | Loss |
| RP11-834C11.14 | Gain |
| RP11-834C11.6 | Loss |
| RP11-867G2.6 | Gain |
| RP11-89F3.2 | Gain |
| RP11-933H2.4 | Gain |
| RP11-963H4.3 | Loss |
| RP1-274L7.1 | Gain |
| RP13-137A17.4 | Loss |
| RP13-137A17.6 | Loss |
| RP13-379O24.3 | Loss |
| RP1-63G5.5 | Gain |
| RP1-79C4.4 | Gain |
| RP3-522D1.1 | Gain |
| RP4-562J12.2 | Gain |
| RP4-594A5.1 | Gain |
| RP5-1077H22.2 | Loss |
| RP5-1121A15.3 | Gain |
| RP5-884M6.1 | Gain |
| RP5-916L7.2 | Gain |
| RP6-114E22.1 | Gain |
| SNORA31 | Gain |
| SNORA48 | Gain |
| SNORD56B | Loss |
| snoU13 | Gain |
| SOX21-AS1 | Loss |
| TPTEP1 | Loss |
| TTTY15 | Loss |
| U3 | Loss |
| U8 | Loss |

[0174] Validation of H3K4Me3 Hi/H3K4Me1 Lo Regions as True Promoters

[0175] Four lines of evidence support the vast majority of H3K4me3 hi/H3K4me1 lo regions as true promoters. First, H3K4me3 hi/H3K4me1 lo regions were strongly enriched at genomic locations located 1 kb upstream of known GENCODE transcription start sites (TSSs) (FIG. 7). Second, at TSS regions, H3K4me3 signals exhibited a classical skewed bimodal intensity pattern, previously reported to be associated with promoters (FIG. 7). Third, when overlapped with regions defined by the Epigenomic Roadmap (EpiRd) 15 state model, we observed significant enrichments of H3K4me3 hi/H3K4me1 lo regions at proximal promoter states (TSSs/Regions flanking transcription sites) in gastrointestinal tissues relative to other tissues (FIG. 7). Fourth, CAGE (CAP analysis gene expression) is a specialized transcriptome sequencing method used to map gene promoters using 5′ mRNA data. Integration with CAGE data from the FANTOMS consortium revealed an 81% overlap of H3K4me3 hi/H3K4me1 lo regions with robust CAGE tag clusters. (FIG. 7).

[0176] Somatic Promoters in GC Exhibit Deregulation in Diverse Cancer Types

[0177] To explore relationships between epigenomic promoter alterations and gene expression, we analyzed RNA-seq data from the same discovery cohort (˜106 million reads/sample), quantifying RNA-seq transcript reads mapping to the epigenome-guided promoter regions or directly downstream. Examining somatic promoter regions (FIG. 2A provides an illustrative example of a gained somatic promoter), we observed significantly increased expression at gained somatic promoters in GCs, and significantly decreased expression at lost somatic promoters, compared to either all promoters (P<0.001, FIG. 2B), or unaltered promoters (P<0.001, FIG. 10). Among other types of epigenetic modifications, previous studies have also reported a reciprocal relationship between active regulatory regions and DNA methylation. Using Infinium 450K DNA methylation arrays, we identified 7,505 CpG sites overlapping somatic promoter regions (5,213 sites for gained somatic promoters, 2,292 sites for lost somatic promoters). Promoters gained in GC were significantly hypomethylated compared to all promoters, (P<0.001, Wilcoxon test) while promoters lost in GC were hypermethylated (P<0.001, Wilcoxon test) (FIG. 2b, bottom). As DNA methylation typically occurs in CpG rich regions, (56) we then repeated the analysis focusing only on CpG island bearing promoters (Methods and Materials). Similar to the original results, CpG island bearing promoters gained in GC were significantly hypomethylated compared to all CpG island bearing promoters, (P<0.001, Wilcoxon test) while CpG island bearing promoters lost in GC were hypermethylated (P<0.001, Wilcoxon test) (FIG. 11).

[0178] To validate the somatic promoter alterations in a larger independent GC cohort and also to examine their behavior in other cancer types, we proceeded to query RNA-seq data of 354 GC samples from the TCGA consortium (n=321 GC, n=33 matched normals). To perform this analysis, RNA-seq reads from TCGA samples were mapped against the epigenome-guided somatic promoter regions defined by the discovery samples, and normalized to calculate fold change differences in expression in GC vs. normals (see Methods and Materials). Similar to the discovery series, we observed that TCGA GCs also exhibited significantly increased expression at gained somatic promoters, while lost somatic promoters exhibited decreased expression, relative to either all promoters (P<0.001, FIG. 2C) or unaltered promoters (P<0.001, FIG. 10). We further tested the tissue-specificity of the GC somatic promoters by querying RNA-seq data from other tumor types, including colon, kidney renal clear cell carcinoma (ccRCC), and lung adenocarcinoma (LUAD) (FIG. 2d). Almost two-thirds (n=1231, 63%, FC=1.5) of GC somatic promoters were also differentially regulated in TCGA colon cancer samples and similarly, a significant proportion of GC somatic promoters were also associated with differential RNA-seq expression in TCGA ccRCC (n=939, 48%, FC=1.5) and LUAD samples (n=1059, 54%, FC=1.5) (FIG. 2D). This result suggests that many GC somatic promoters are also likely associated with deregulated promoter activity in other solid epithelial malignancies.

[0179] Role of Alternative Promoters

[0180] By comparing the somatic promoters against the reference Gencode database (V19), we discovered extensive use of alternative promoters (18%) in GCs, defined as situations where a common unaltered promoter is present in both normal tissues and tumors (canonical promoter) but a secondary tumor-specific promoter is engaged in the latter (alternative promoter). The remaining 82% of somatic promoters corresponded to single major isoforms or unannotated transcripts (see later). 57% of the alternative promoters occurred downstream of the canonical promoter. Using multiple RNA-seq analysis methods, we confirmed that transcript isoforms driven by alternative promoters are overexpressed in GCs to a significantly greater degree than canonical promoters in the same gene (Methods and Materials, FIG. 12). For example, HNF4α, a transcription factor overexpressed in GC, is driven by two promoters (P1 and P2). At the HNF4α canonical promoter (“P2”), we observed equal promoter signals in GCs and normal tissues; however we also further observed gain of an additional promoter in GCs at a transcription start site 45 kb downstream (“P1”). Similar HNF4α P1 promoter gains were also observed in GC cell lines (FIG. 3a), with RNA-seq analysis supporting HNF4α P1 isoform expression in GCs. Alternative promoter usage was also observed at the EpCAM gene, frequently used to identify circulating tumor cells, causing expression of EpCAM transcript ENST00000263735.4 (FIG. 3b). Notably, both the HNF4α and EpCAM alternative isoforms exhibited significantly greater cancer overexpression compared to their canonical isoforms (FIG. 12). Other genes associated with tumor-specific alternative promoters, many reported for the first time, including NKX6-3 (FC 1.83, q<0.05) and GRIN2D (FC 1.9, q<0.001). A complete list of GC tumor-specific promoters is provided (Table 6).

TABLE 6
Alternative Promoters

| | | | Change | |
|---|---|---|---|---|
| | H3K4Me3 | | in | |
| Loci | (T/N) | Type | protein | Gene |
| chr2: 69900550-69901900 | Loss | Alternate | 1 | AAK1 |
| chr2: 44058400-44060450 | Gain | Alternate | 1 | ABCG5 |
| chr1: 179108750- | Gain | Alternate | 1 | ABL2 |
| 179113100 | | | | |
| chr1: 6451200-6453300 | Gain | Alternate | 1 | ACOT7 |
| chr7: 991700-995250 | Gain | Alternate | 1 | ADAP1 |
| chr11: 69811750- | Gain | Alternate | 1 | ANO1 |
| 69814800 | | | | |
| chr19: 50308050- | Gain | Alternate | 1 | AP2A1 |
| 50309350 | | | | |
| chr17: 36620950- | Gain | Alternate | 1 | ARHGAP23 |
| 36622550 | | | | |
| chr2: 10902450-10904150 | Gain | Alternate | 1 | ATP6V1C2 |
| chr7: 70060000-70066050 | Gain | Alternate | 1 | AUTS2 |
| chr18: 60804550- | Loss | Alternate | 1 | BCL2 |
| 60807050 | | | | |
| chr11: 1463100-1464700 | Gain | Alternate | 1 | BRSK2 |
| chr4: 2038150-2039400 | Gain | Alternate | 1 | C4orf48 |
| chr21: 44482600- | Gain | Alternate | 1 | CBS |
| 44484300 | | | | |
| chr3: 46988600-46990000 | Gain | Alternate | 1 | CCDC12 |
| chr16: 28946800- | Gain | Alternate | 1 | CD19 |
| 28948350 | | | | |
| chr6: 4836100-4837550 | Gain | Alternate | 1 | CDYL |
| chr6: 118985250- | Loss | Alternate | 1 | CEP85L |
| 118986450 | | | | |
| chr9: 124497650- | Gain | Alternate | 1 | DAB2IP |
| 124504300 | | | | |
| chr19: 6474700-6477300 | Gain | Alternate | 1 | DENND1C |
| chr4: 955250-957700 | Gain | Alternate | 1 | DGKQ |
| chr16: 21059250- | Gain | Alternate | 1 | DNAH3 |
| 21060650 | | | | |
| chr7: 35074250-35076850 | Gain | Alternate | 1 | DPY19L1 |
| chr6: 56553350-56559100 | Gain | Alternate | 1 | DST |
| chr2: 47595450-47602500 | Gain | Alternate | 1 | EPCAM |
| chrX: 137860100- | Gain | Alternate | 1 | FGF13 |
| 137861300 | | | | |
| chr3: 69283500-69286950 | Gain | Alternate | 1 | FRMD4B |
| chr7: 99774000-99776200 | Gain | Alternate | 1 | GPC2 |
| chr10: 25754300- | Gain | Alternate | 1 | GPR158 |
| 25755900 | | | | |
| chr11: 123458150- | Gain | Alternate | 1 | GRAMD1B |
| 123465950 | | | | |
| chr20: 43029650- | Gain | Alternate | 1 | HNF4A |
| 43032200 | | | | |
| chr17: 46639600- | Gain | Alternate | 1 | HOXB3 |
| 46642950 | | | | |
| chr7: 23506000-23515500 | Gain | Alternate | 1 | IGF2BP3 |
| chr1: 38410700-38414500 | Loss | Alternate | 1 | INPP5B |
| chr19: 17952000- | Gain | Alternate | 1 | JAK3 |
| 17953950 | | | | |
| chr14: 24891600- | Loss | Alternate | 1 | KHNYN |
| 24897600 | | | | |
| chr18: 21452050- | Gain | Alternate | 1 | LAMA3 |
| 21455250 | | | | |
| chr5: 154091500- | Loss | Alternate | 1 | LARP1 |
| 154095100 | | | | |
| chr5: 38605950-38609550 | Loss | Alternate | 1 | LIFR |
| chr16: 1013250-1015550 | Gain | Alternate | 1 | LMF1 |
| chr19: 49003900- | Gain | Alternate | 1 | LMTK3 |
| 49005550 | | | | |
| chr1: 156896950- | Gain | Alternate | 1 | LRRC71 |
| 156898350 | | | | |
| chr1: 156893100- | Gain | Alternate | 1 | LRRC71 |
| 156894550 | | | | |
| chr1: 236045300- | Loss | Alternate | 1 | LYST |
| 236047550 | | | | |
| chr20: 33134200- | Gain | Alternate | 1 | MAP1LC3A |
| 33135900 | | | | |
| chr7: 130125100- | Gain | Alternate | 1 | MEST |
| 130127800 | | | | |
| chr7: 116363550- | Gain | Alternate | 1 | MET |
| 116365500 | | | | |
| chr3: 158448250- | Gain | Alternate | 1 | MFSD1 |
| 158451400 | | | | |
| chr1: 1562700-1565700 | Gain | Alternate | 1 | MIB2 |
| chr14: 102700300- | Gain | Alternate | 1 | MOK |
| 102702150 | | | | |
| chr17: 60756900- | Gain | Alternate | 1 | MRC2 |
| 60758850 | | | | |
| chr8: 144652950- | Gain | Alternate | 1 | MROH6 |
| 144655550 | | | | |
| chr7: 100607850- | Gain | Alternate | 1 | MUC12 |
| 100613600 | | | | |
| chr11: 76902300- | Gain | Alternate | 1 | MYO7A |
| 76903800 | | | | |
| chr1: 24434350-24435800 | Gain | Alternate | 1 | MYOM3 |
| chr6: 126136250- | Loss | Alternate | 1 | NCOA7 |
| 126140700 | | | | |
| chr2: 233755200- | Gain | Alternate | 1 | NGEF |
| 233756650 | | | | |
| chr2: 233791350- | Gain | Alternate | 1 | NGEF |
| 233792700 | | | | |
| chr17: 26119900- | Gain | Alternate | 1 | NOS2 |
| 26121850 | | | | |
| chr1: 200007500- | Gain | Alternate | 1 | NR5A2 |
| 200010950 | | | | |
| chr18: 55099800- | Gain | Alternate | 1 | ONECUT2 |
| 55108900 | | | | |
| chr8: 107629450- | Loss | Alternate | 1 | OXR1 |
| 107632850 | | | | |
| chr4: 169575100- | Loss | Alternate | 1 | PALLD |
| 169577200 | | | | |
| chr19: 18364400- | Loss | Alternate | 1 | PDE4C |
| 18366800 | | | | |
| chr4: 111557000- | Gain | Alternate | 1 | PITX2 |
| 111559350 | | | | |
| chr8: 145009000- | Gain | Alternate | 1 | PLEC |
| 145018500 | | | | |
| chr19: 49370000- | Gain | Alternate | 1 | PLEKHA4 |
| 49372300 | | | | |
| chr11: 16944700- | Gain | Alternate | 1 | PLEKHA7 |
| 16947800 | | | | |
| chr1: 6530450-6535000 | Gain | Alternate | 1 | PLEKHG5 |
| chr5: 74990850-74992350 | Gain | Alternate | 1 | POC5 |
| chr6: 35359200-35364100 | Loss | Alternate | 1 | PPARD |
| chr19: 49631500- | Gain | Alternate | 1 | PPFIA3 |
| 49632100 | | | | |
| chr22: 22900650- | Gain | Alternate | 1 | PRAME |
| 22902550 | | | | |
| chr9: 132458700- | Gain | Alternate | 1 | PRRX2 |
| 132461300 | | | | |
| chr9: 139873000- | Gain | Alternate | 1 | PTGDS |
| 139874300 | | | | |
| chr1: 29562850-29565950 | Gain | Alternate | 1 | PTPRU |
| chr17: 2878500-2880550 | Gain | Alternate | 1 | RAP1GAP2 |
| chr9: 134548500- | Loss | Alternate | 1 | RAPGEF1 |
| 134553400 | | | | |
| chr3: 24851300-24854350 | Loss | Alternate | 1 | RARB |
| chr13: 114769100- | Gain | Alternate | 1 | RASA3 |
| 114771100 | | | | |
| chr20: 399750-402500 | Gain | Alternate | 1 | RBCK1 |
| chr19: 14088450- | Gain | Alternate | 1 | RFX1 |
| 14090950 | | | | |
| chr4: 3310150-3312100 | Gain | Alternate | 1 | RGS12 |
| chr8: 74035400-74036300 | Loss | Alternate | 1 | SBSPON |
| chr21: 38063750- | Loss | Alternate | 1 | SIM2 |
| 38066650 | | | | |
| chr19: 19215350- | Gain | Alternate | 1 | SLC25A42 |
| 19217300 | | | | |
| chr7: 103021250- | Loss | Alternate | 1 | SLC26A5 |
| 103022850 | | | | |
| chr12: 40425950- | Loss | Alternate | 1 | SLC2A13 |
| 40427700 | | | | |
| chr12: 20975550- | Gain | Alternate | 1 | SLCO1B3 |
| 20976900 | | | | |
| chr16: 68418000- | Loss | Alternate | 1 | SMPD3 |
| 68421750 | | | | |
| chr4: 186729400- | Loss | Alternate | 1 | SORBS2 |
| 186734150 | | | | |
| chr2: 231206350- | Gain | Alternate | 1 | SP140L |
| 231208750 | | | | |
| chr7: 87854350-87856200 | Gain | Alternate | 1 | SRI |
| chr3: 17734300-17735900 | Gain | Alternate | 1 | TBC1D5 |
| chr8: 67866500-67867950 | Gain | Alternate | 1 | TCF24 |
| chr6: 10409250-10419650 | Gain | Alternate | 1 | TFAP2A |
| chr3: 129512300- | Gain | Alternate | 1 | TMCC1 |
| 129514550 | | | | |
| chr18: 20910450- | Gain | Alternate | 1 | TMEM241 |
| 20912050 | | | | |
| chr2: 218874000- | Gain | Alternate | 1 | TNS1 |
| 218875450 | | | | |
| chr8: 141017700- | Gain | Alternate | 1 | TRAPPC9 |
| 141019200 | | | | |
| chr4: 8435700-8439650 | Loss | Alternate | 1 | TRMT44 |
| chr21: 45844650- | Gain | Alternate | 1 | TRPM2 |
| 45846700 | | | | |
| chrX: 107016000- | Loss | Alternate | 1 | TSC22D3 |
| 107021000 | | | | |
| chr2: 3371900-3374350 | Gain | Alternate | 1 | TSSC1 |
| chr17: 40784750- | Loss | Alternate | 1 | TUBG2 |
| 40786950 | | | | |
| chr16: 1428050-1430700 | Gain | Alternate | 1 | UNKL |
| chr12: 109507100- | Gain | Alternate | 1 | USP30 |
| 109508350 | | | | |
| chr20: 50719850- | Gain | Alternate | 1 | ZFP64 |
| 50723350 | | | | |
| chr4: 8128400-8130450 | Gain | Alternate | 0 | ABLIM2 |
| chr16: 72660100- | Gain | Alternate | 0 | AC004158.2 |
| 72662050 | | | | |
| chr2: 66801200-66811950 | Gain | Alternate | 0 | AC007392.3 |
| chr2: 114081700- | Gain | Alternate | 0 | AC016745.3 |
| 114084050 | | | | |
| chr19: 52104750- | Loss | Alternate | 0 | AC018755.16 |
| 52106000 | | | | |
| chr2: 19504600-19506400 | Gain | Alternate | 0 | AC092594.1 |
| chr2: 118899750- | Gain | Alternate | 0 | AC093901.1 |
| 118901550 | | | | |
| chr17: 263900-267650 | Loss | Alternate | 0 | AC108004.3 |
| chr3: 18734950-18736300 | Gain | Alternate | 0 | AC144521.1 |
| chr12: 109568950- | Loss | Alternate | 0 | ACACB |
| 109570000 | | | | |
| chrX: 23783150- | Gain | Alternate | 0 | ACOT9 |
| 23786000 | | | | |
| chr7: 5601050-5603800 | Gain | Alternate | 0 | ACTB |
| chr7: 15600650- | Gain | Alternate | 0 | AGMO |
| 15602200 | | | | |
| chr21: 45336050- | Loss | Alternate | 0 | AGPAT3 |
| 45337600 | | | | |
| chr15: 86232000- | Loss | Alternate | 0 | AKAP13 |
| 86236800 | | | | |
| chr9: 112909300- | Loss | Alternate | 0 | AKAP2 |
| 112915400 | | | | |
| chr2: 241496150- | Gain | Alternate | 0 | ANKMY1 |
| 241498200 | | | | |
| chr2: 242127000- | Loss | Alternate | 0 | ANO7 |
| 242129850 | | | | |
| chr5: 139972550- | Gain | Alternate | 0 | APBB3 |
| 139973900 | | | | |
| chr18: 24443050- | Loss | Alternate | 0 | AQP4-AS1 |
| 24445900 | | | | |
| chr4: 86395150-86399900 | Loss | Alternate | 0 | ARHGAP24 |
| chr19: 47362700- | Gain | Alternate | 0 | ARHGAP35 |
| 47367650 | | | | |
| chr9: 35672750-35677150 | Loss | Alternate | 0 | ARHGEF39 |
| chrX: 100739600- | Gain | Alternate | 0 | ARMCX4 |
| 100741600 | | | | |
| chr9: 120175650- | Loss | Alternate | 0 | ASTN2 |
| 120177900 | | | | |
| chr3: 193270000- | Loss | Alternate | 0 | ATP13A4 |
| 193274550 | | | | |
| chr18: 77102950- | Loss | Alternate | 0 | ATP9B |
| 77104300 | | | | |
| chr1: 179486050- | Loss | Alternate | 0 | AXDND1 |
| 179487950 | | | | |
| chr4: 102332100- | Gain | Alternate | 0 | BANK1 |
| 102333250 | | | | |
| chr1: 94046300-94051100 | Loss | Alternate | 0 | BCAR3 |
| chr11: 27686500- | Gain | Alternate | 0 | BDNF-AS |
| 27687900 | | | | |
| chr20: 11897750- | Loss | Alternate | 0 | BTBD3 |
| 11902000 | | | | |
| chr11: 63531650- | Gain | Alternate | 0 | C11orf95 |
| 63533550 | | | | |
| chr19: 30199050- | Gain | Alternate | 0 | C19orf12 |
| 30200500 | | | | |
| chr1: 207991400- | Loss | Alternate | 0 | C1orf132 |
| 208001200 | | | | |
| chr6: 109571700- | Gain | Alternate | 0 | C6orf183 |
| 109573350 | | | | |
| chr8: 128305850- | Gain | Alternate | 0 | CASC8 |
| 128307550 | | | | |
| chr5: 43409150-43412850 | Loss | Alternate | 0 | CCL28 |
| chr8: 95245700-95247400 | Gain | Alternate | 0 | CDH17 |
| chr7: 105603300- | Loss | Alternate | 0 | CDHR3 |
| 105604700 | | | | |
| chr7: 90338500-90340500 | Loss | Alternate | 0 | CDK14 |
| chr7: 29184550-29187650 | Gain | Alternate | 0 | CHN2 |
| chr15: 79011600- | Gain | Alternate | 0 | CHRNB4 |
| 79013200 | | | | |
| chr7: 139226300- | Gain | Alternate | 0 | CLEC2L |
| 139228850 | | | | |
| chr6: 25164900-25167200 | Loss | Alternate | 0 | CMAHP |
| chr16: 81684900- | Loss | Alternate | 0 | CMIP |
| 81687600 | | | | |
| chr6: 37391200-37392800 | Gain | Alternate | 0 | CMTR1 |
| chr3: 74662150-74664400 | Loss | Alternate | 0 | CNTN3 |
| chr11: 111172600- | Loss | Alternate | 0 | COLCA1 |
| 111176650 | | | | |
| chr6: 36722500-36725900 | Loss | Alternate | 0 | CPNE5 |
| chr11: 85392850- | Loss | Alternate | 0 | CREBZF |
| 85394650 | | | | |
| chr16: 21288600- | Gain | Alternate | 0 | CRYM |
| 21290700 | | | | |
| chr5: 60597450-60601050 | Loss | Alternate | 0 | CTC- |
| | | | | 436P18.3 |
| chr15: 45544050- | Loss | Alternate | 0 | CTD- |
| 45548600 | | | | 2651B20.3 |
| chr20: 110300-111350 | Gain | Alternate | 0 | DEFB126 |
| chr2: 234326350- | Loss | Alternate | 0 | DGKD |
| 234331500 | | | | |
| chr1: 223101350- | Loss | Alternate | 0 | DISP1 |
| 223104800 | | | | |
| chr11: 111852050- | Loss | Alternate | 0 | DIXDC1 |
| 111855050 | | | | |
| chr13: 50759600- | Gain | Alternate | 0 | DLEU1 |
| 50762100 | | | | |
| chr1: 46954600-46956800 | Gain | Alternate | 0 | DMBX1 |
| chr16: 30021900- | Gain | Alternate | 0 | DOC2A |
| 30023950 | | | | |
| chr6: 56715250-56717500 | Gain | Alternate | 0 | DST |
| chr18: 46894350- | Loss | Alternate | 0 | DYM |
| 46895900 | | | | |
| chr5: 106838450- | Loss | Alternate | 0 | EFNA5 |
| 106842400 | | | | |
| chr4: 111331750- | Gain | Alternate | 0 | ENPEP |
| 111333350 | | | | |
| chr14: 74461400- | Loss | Alternate | 0 | ENTPD5 |
| 74463450 | | | | |
| chr19: 55590850- | Gain | Alternate | 0 | EPS8L1 |
| 55593800 | | | | |
| chr5: 172332450- | Loss | Alternate | 0 | ERGIC1 |
| 172333000 | | | | |
| chr1: 17024500-17028900 | Gain | Alternate | 0 | ESPNP |
| chr1: 216892850- | Loss | Alternate | 0 | ESRRG |
| 216898200 | | | | |
| chr1: 217249050- | Loss | Alternate | 0 | ESRRG |
| 217252200 | | | | |
| chr6: 36326200-36331550 | Gain | Alternate | 0 | ETV7 |
| chr12: 124778800- | Loss | Alternate | 0 | FAM101A |
| 124786100 | | | | |
| chr17: 47822200- | Loss | Alternate | 0 | FAM117A |
| 47825200 | | | | |
| chr4: 187025100- | Loss | Alternate | 0 | FAM149A |
| 187028650 | | | | |
| chr1: 178986050- | Loss | Alternate | 0 | FAM20B |
| 178987900 | | | | |
| chr7: 102574000- | Loss | Alternate | 0 | FBXL13 |
| 102576900 | | | | |
| chr16: 86529000- | Loss | Alternate | 0 | FENDRR |
| 86534050 | | | | |
| chr20: 34192700- | Loss | Alternate | 0 | FER1L4 |
| 34196000 | | | | |
| chr8: 124926550- | Gain | Alternate | 0 | FER1L6 |
| 124929550 | | | | |
| chr7: 121942750- | Gain | Alternate | 0 | FEZF1 |
| 121947900 | | | | |
| chr12: 32654200- | Loss | Alternate | 0 | FGD4 |
| 32659150 | | | | |
| chr16: 86608950- | Gain | Alternate | 0 | FOXL1 |
| 86611800 | | | | |
| chr8: 75230900-75235150 | Gain | Alternate | 0 | GDAP1 |
| chr7: 100288750- | Gain | Alternate | 0 | GIGYF1 |
| 100293000 | | | | |
| chr11: 58694450- | Loss | Alternate | 0 | GLYATL1 |
| 58696550 | | | | |
| chr5: 89854500-89855350 | Loss | Alternate | 0 | GPR98 |
| chr2: 165476750- | Gain | Alternate | 0 | GRB14 |
| 165479250 | | | | |
| chr9: 140056700- | Gain | Alternate | 0 | GRIN1 |
| 140058300 | | | | |
| chr19: 48900250- | Gain | Alternate | 0 | GRIN2D |
| 48904400 | | | | |
| chr9: 104466750- | Gain | Alternate | 0 | GRIN3A |
| 104468450 | | | | |
| chr3: 14642850-14644150 | Loss | Alternate | 0 | GRIP2 |
| chr11: 2016000-2021350 | Gain | Alternate | 0 | H19 |
| chrX: 152760450- | Gain | Alternate | 0 | HAUS7 |
| 152761150 | | | | |
| chr7: 18534500-18539050 | Loss | Alternate | 0 | HDAC9 |
| chr15: 83619150- | Loss | Alternate | 0 | HOMER2 |
| 83622750 | | | | |
| chr7: 27159450-27164850 | Gain | Alternate | 0 | HOXA3 |
| chr7: 27208400-27220700 | Gain | Alternate | 0 | HOXA9 |
| chr17: 46678350- | Gain | Alternate | 0 | HOXB6 |
| 46683450 | | | | |
| chr17: 46694850- | Gain | Alternate | 0 | HOXB8 |
| 46697150 | | | | |
| chr3: 11178050-11179900 | Gain | Alternate | 0 | HRH1 |
| chr3: 11195250-11198600 | Gain | Alternate | 0 | HRH1 |
| chr3: 11265900-11269000 | Gain | Alternate | 0 | HRH1 |
| chr1: 23543800-23544900 | Gain | Alternate | 0 | HTR1D |
| chrX: 130711450- | Gain | Alternate | 0 | IGSF1 |
| 130713600 | | | | |
| chr17: 38016450- | Loss | Alternate | 0 | IKZF3 |
| 38022250 | | | | |
| chr2: 113619100- | Loss | Alternate | 0 | IL1B |
| 113622250 | | | | |
| chr4: 143394250- | Gain | Alternate | 0 | INPP4B |
| 143396200 | | | | |
| chr19: 2255550-2257400 | Loss | Alternate | 0 | JSRP1 |
| chr17: 68071050- | Loss | Alternate | 0 | KCNJ16 |
| 68073700 | | | | |
| chr14: 88788450- | Gain | Alternate | 0 | KCNK10 |
| 88791000 | | | | |
| chr4: 56914350-56916700 | Gain | Alternate | 0 | KIAA1211 |
| chr10: 24725650- | Loss | Alternate | 0 | KIAA1217 |
| 24728200 | | | | |
| chr11: 33398050- | Gain | Alternate | 0 | KIAA1549L |
| 33400750 | | | | |
| chr15: 31637200- | Loss | Alternate | 0 | KLF13 |
| 31640250 | | | | |
| chr19: 55019200- | Gain | Alternate | 0 | LAIR2 |
| 55020400 | | | | |
| chr1: 65991250-65992850 | Loss | Alternate | 0 | LEPR |
| chr5: 78014050-78017100 | Loss | Alternate | 0 | LHFPL2 |
| chr12: 113904650- | Gain | Alternate | 0 | LHX5 |
| 113906650 | | | | |
| chr22: 30651400- | Gain | Alternate | 0 | LIF |
| 30654850 | | | | |
| chr20: 21085550- | Gain | Alternate | 0 | LINC00237 |
| 21087550 | | | | |
| chr13: 74234250- | Gain | Alternate | 0 | LINC00393 |
| 74236800 | | | | |
| chr3: 8652200-8654000 | Gain | Alternate | 0 | LMCD1- |
| | | | | AS1 |
| chr20: 6031700-6033850 | Gain | Alternate | 0 | LRRN4 |
| chr3: 116161150- | Gain | Alternate | 0 | LSAMP |
| 116164900 | | | | |
| chr11: 1889150-1894600 | Loss | Alternate | 0 | LSP1 |
| chrX: 149588950- | Gain | Alternate | 0 | MAMLD1 |
| 149590100 | | | | |
| chr1: 27683050-27684600 | Loss | Alternate | 0 | MAP3K6 |
| chrX: 20115700- | Loss | Alternate | 0 | MAP7D2 |
| 20118300 | | | | |
| chr3: 150959500- | Gain | Alternate | 0 | MED12L |
| 150960300 | | | | |
| chr22: 42148300- | Loss | Alternate | 0 | MEI1 |
| 42150300 | | | | |
| chr1: 205537050- | Loss | Alternate | 0 | MFSD4 |
| 205540700 | | | | |
| chr1: 22489600-22491100 | Gain | Alternate | 0 | MIR4418 |
| chr19: 748150-750100 | Gain | Alternate | 0 | MISP |
| chr3: 69914350-69917750 | Loss | Alternate | 0 | MITF |
| chr6: 168215700- | Gain | Alternate | 0 | MLLT4- |
| 168217350 | | | | AS1 |
| chr19: 1286150-1288700 | Gain | Alternate | 0 | MUM1 |
| chr19: 50690700- | Gain | Alternate | 0 | MYH14 |
| 50695700 | | | | |
| chr17: 73606350- | Gain | Alternate | 0 | MYO156 |
| 73609450 | | | | |
| chr17: 31010250- | Gain | Alternate | 0 | MYO1D |
| 31012000 | | | | |
| chr18: 55888350- | Loss | Alternate | 0 | NEDD4L |
| 55892150 | | | | |
| chr2: 131965200- | Gain | Alternate | 0 | NF1P8 |
| 131968600 | | | | |
| chr14: 27147750- | Gain | Alternate | 0 | NOVA1- |
| 27148900 | | | | AS1 |
| chr11: 108040050- | Loss | Alternate | 0 | NPAT |
| 108041550 | | | | |
| chr7: 98248450-98250250 | Gain | Alternate | 0 | NPTX2 |
| chr15: 76302650- | Loss | Alternate | 0 | NRG4 |
| 76305350 | | | | |
| chr9: 132370500- | Gain | Alternate | 0 | NTMT1 |
| 132373750 | | | | |
| chr3: 32118200-32120100 | Gain | Alternate | 0 | OSBPL10 |
| chr19: 14171500- | Loss | Alternate | 0 | PALM3 |
| 14173250 | | | | |
| chr7: 32107350-32111900 | Loss | Alternate | 0 | PDE1C |
| chr3: 111450850- | Loss | Alternate | 0 | PHLDB2 |
| 111453300 | | | | |
| chr12: 18395250- | Loss | Alternate | 0 | PIK3C2G |
| 18399450 | | | | |
| chr8: 110534900- | Loss | Alternate | 0 | PKHD1L1 |
| 110536100 | | | | |
| chr20: 8094750-8096650 | Gain | Alternate | 0 | PLCB1 |
| chr1: 6544500-6545600 | Gain | Alternate | 0 | PLEKHG5 |
| chr22: 41990400- | Gain | Alternate | 0 | PMM1 |
| 41991450 | | | | |
| chr6: 31150550-31154950 | Loss | Alternate | 0 | POU5F1 |
| chr11: 7626600-7631400 | Loss | Alternate | 0 | PPFIBP2 |
| chr2: 182895050- | Gain | Alternate | 0 | PPP1R1C |
| 182896750 | | | | |
| chr8: 143759850- | Loss | Alternate | 0 | PSCA |
| 143765700 | | | | |
| chr8: 27237450-27239750 | Loss | Alternate | 0 | PTK2B |
| chr8: 142384050- | Gain | Alternate | 0 | PTP4A3 |
| 142385550 | | | | |
| chr9: 96767600-96770450 | Loss | Alternate | 0 | PTPDC1 |
| chr12: 120661250- | Loss | Alternate | 0 | PXN |
| 120664850 | | | | |
| chr18: 52384600- | Loss | Alternate | 0 | RAB27B |
| 52386250 | | | | |
| chr11: 82706750- | Loss | Alternate | 0 | RAB30 |
| 82709350 | | | | |
| chr8: 95485350-95488300 | Gain | Alternate | 0 | RAD54B |
| chr4: 82964050-82966400 | Gain | Alternate | 0 | RASGEF1B |
| chr4: 40512300-40518850 | Loss | Alternate | 0 | RBM47 |
| chr9: 116225550- | Gain | Alternate | 0 | RGS3 |
| 116228700 | | | | |
| chr10: 62758000- | Loss | Alternate | 0 | RHOBTB1 |
| 62762450 | | | | |
| chr8: 104510350- | Gain | Alternate | 0 | RIMS2 |
| 104514700 | | | | |
| chr21: 38379100- | Gain | Alternate | 0 | RIPPLY3 |
| 38379750 | | | | |
| chr8: 61324800-61327100 | Gain | Alternate | 0 | RP11- |
| | | | | 163N6.2 |
| chr20: 6301750-6304300 | Gain | Alternate | 0 | RP11- |
| | | | | 199O14.1 |
| chr3: 187606800- | Gain | Alternate | 0 | RP11- |
| 187608950 | | | | 30O15.1 |
| chr1: 39191950-39194400 | Loss | Alternate | 0 | RP11- |
| | | | | 334L9.1 |
| chr11: 112140350- | Gain | Alternate | 0 | RP11- |
| 112142500 | | | | 356J5.12 |
| chr6: 82809950-82812100 | Gain | Alternate | 0 | RP11- |
| | | | | 379B8.1 |
| chr14: 39702300- | Loss | Alternate | 0 | RP11- |
| 39706400 | | | | 407N17.3 |
| chr1: 203394800- | Gain | Alternate | 0 | RP11- |
| 203398950 | | | | 435P24.3 |
| chr9: 72091300-72092650 | Gain | Alternate | 0 | RP11- |
| | | | | 470P21.2 |
| chr15: 82161650- | Gain | Alternate | 0 | RP11- |
| 82163400 | | | | 499F3.2 |
| chr4: 88631250- | Gain | Alternate | 0 | RP11- |
| 88631950 | | | | 742B18.1 |
| chr11: 94372300- | Gain | Alternate | 0 | RP11- |
| 94374550 | | | | 867G2.5 |
| chr3: 131049650- | Gain | Alternate | 0 | RP11- |
| 131051500 | | | | 933H2.4 |
| chr17: 10746250- | Loss | Alternate | 0 | RP11- |
| 10749200 | | | | 963H4.3 |
| chr6: 85334900-85337050 | Gain | Alternate | 0 | RP1- |
| | | | | 90L14.1 |
| chr7: 156735150- | Gain | Alternate | 0 | RP5- |
| 156736500 | | | | 1121A15.3 |
| chr2: 55236200-55238400 | Loss | Alternate | 0 | RTN4 |
| chr16: 51186150- | Loss | Alternate | 0 | SALL1 |
| 51187850 | | | | |
| chr2: 200326950- | Gain | Alternate | 0 | SATB2 |
| 200329550 | | | | |
| chr3: 53031650-53034600 | Gain | Alternate | 0 | SFMBT1 |
| chr14: 71849000- | Loss | Alternate | 0 | SIPA1L1 |
| 71850350 | | | | |
| chr1: 232760700- | Gain | Alternate | 0 | SIPA1L2 |
| 232767700 | | | | |
| chr7: 100448750- | Gain | Alternate | 0 | SLC12A9 |
| 100451750 | | | | |
| chr12: 105344050- | Loss | Alternate | 0 | SLC41A2 |
| 105348050 | | | | |
| chr6: 31843950-31847850 | Loss | Alternate | 0 | SLC44A4 |
| chr1: 75840850-75842350 | Gain | Alternate | 0 | SLC44A5 |
| chr1: 205637750- | Gain | Alternate | 0 | SLC45A3 |
| 205639250 | | | | |
| chr11: 26985950- | Gain | Alternate | 0 | SLC5A12 |
| 26987450 | | | | |
| chr14: 23622000- | Loss | Alternate | 0 | SLC7A8 |
| 23623950 | | | | |
| chr22: 31459200- | Gain | Alternate | 0 | SMTN |
| 31461650 | | | | |
| chr20: 10197250- | Gain | Alternate | 0 | SNAP25- |
| 10201300 | | | | AS1 |
| chr16: 1842850-1844950 | Loss | Alternate | 0 | SPSB3 |
| chr11: 4010850-4011700 | Loss | Alternate | 0 | STIM1 |
| chr8: 99951150-99961750 | Gain | Alternate | 0 | STK3 |
| chr7: 23761400-23764000 | Gain | Alternate | 0 | STK31 |
| chr1: 110573450- | Loss | Alternate | 0 | STRIP1 |
| 110574700 | | | | |
| chr7: 73131100-73134700 | Gain | Alternate | 0 | STX1A |
| chr20: 46411750- | Gain | Alternate | 0 | SULF2 |
| 46414250 | | | | |
| chr12: 79438650- | Gain | Alternate | 0 | SYT1 |
| 79440250 | | | | |
| chr15: 57509850- | Loss | Alternate | 0 | TCF12 |
| 57515600 | | | | |
| chr12: 110411050- | Gain | Alternate | 0 | TCHP |
| 110419200 | | | | |
| chr21: 32640100- | Loss | Alternate | 0 | TIAM1 |
| 32641350 | | | | |
| chr19: 3707600-3711250 | Loss | Alternate | 0 | TJP3 |
| chr10: 102830000- | Loss | Alternate | 0 | TLX1NB |
| 102833650 | | | | |
| chr2: 228241600- | Gain | Alternate | 0 | TM4SF20 |
| 228244450 | | | | |
| chr16: 19427700- | Gain | Alternate | 0 | TMC5 |
| 19435900 | | | | |
| chr7: 47490900-47493500 | Loss | Alternate | 0 | TNS3 |
| chr8: 144436800- | Gain | Alternate | 0 | TOP1MT |
| 144438000 | | | | |
| chr13: 45955000- | Gain | Alternate | 0 | TPT1-AS1 |
| 45957700 | | | | |
| chr17: 3459750-3462900 | Loss | Alternate | 0 | TRPV3 |
| chr3: 12522200-12524700 | Gain | Alternate | 0 | TSEN2 |
| chr22: 46683150- | Loss | Alternate | 0 | TTC38 |
| 46685350 | | | | |
| chr6: 133003800- | Gain | Alternate | 0 | VNN1 |
| 133008900 | | | | |
| chr15: 53831700- | Gain | Alternate | 0 | WDR72 |
| 53833550 | | | | |
| chr11: 102617350- | Gain | Alternate | 0 | WTAPP1 |
| 102619450 | | | | |
| chr11: 68436350- | Gain | Alternate | 0 | Novel Gene |
| 68438200 | | | | |
| chr12: 125226400- | Loss | Alternate | 0 | Novel Gene |
| 125228400 | | | | |
| chr12: 89240400- | Gain | Alternate | 0 | Novel Gene |
| 89241750 | | | | |
| chr14: 99752650- | Loss | Alternate | 0 | Novel Gene |
| 99754000 | | | | |
| chr18: 76805850- | Gain | Alternate | 0 | Novel Gene |
| 76809250 | | | | |
| chr19: 53560600- | Gain | Alternate | 0 | Novel Gene |
| 53562700 | | | | |
| chr2: 45227500-45229600 | Gain | Alternate | 0 | Novel Gene |
| chr2: 134784950- | Gain | Alternate | 0 | Novel Gene |
| 134786450 | | | | |
| chr2: 176458500- | Gain | Alternate | 0 | Novel Gene |
| 176460750 | | | | |
| chr20: 46600150- | Gain | Alternate | 0 | Novel Gene |
| 46603250 | | | | |
| chr4: 10830100-10832350 | Gain | Alternate | 0 | Novel Gene |
| chr5: 35404300-35405800 | Gain | Alternate | 0 | Novel Gene |
| chr5: 42999400-43001150 | Gain | Alternate | 0 | Novel Gene |
| chr5: 72496650-72498300 | Gain | Alternate | 0 | Novel Gene |
| chr1: 204682350- | Loss | Alternate | 0 | Novel Gene |
| 204684550 | | | | |
| chr6: 868400-871100 | Loss | Alternate | 0 | Novel Gene |
| chr1: 220635500- | Gain | Alternate | 0 | Novel Gene |
| 220637400 | | | | |
| chr6: 47146850-47150550 | Loss | Alternate | 0 | Novel Gene |
| chr6: 160720200- | Gain | Alternate | 0 | Novel Gene |
| 160722150 | | | | |
| chr6: 170474550- | Gain | Alternate | 0 | Novel Gene |
| 170475800 | | | | |
| chr1: 242107250- | Gain | Alternate | 0 | Novel Gene |
| 242109450 | | | | |
| chr7: 27274550-27276500 | Gain | Alternate | 0 | Novel Gene |
| chr9: 17905350-17908250 | Loss | Alternate | 0 | Novel Gene |
| chr9: 31848250-31849950 | Gain | Alternate | 0 | Novel Gene |
| chrX: 56133300- | Gain | Alternate | 0 | Novel Gene |
| 56134800 | | | | |
| chrX: 3466450-3468750 | Gain | Alternate | 0 | Novel Gene |
| chrX: 6849150-6851300 | Gain | Alternate | 0 | Novel Gene |
| chr11: 60941900- | Loss | Alternate | 0 | Novel Gene |
| 60945700 | | | | |
| chr11: 71350450- | Gain | Alternate | 0 | Novel Gene |
| 71351500 | | | | |
| chr11: 119775600- | Loss | Alternate | 0 | Novel Gene |
| 119779600 | | | | |
| chr5: 82391600-82392950 | Gain | Alternate | 0 | XRCC4 |
| chr3: 141107100- | Loss | Alternate | 0 | ZBTB38 |
| 141108400 | | | | |
| chr18: 45660800- | Loss | Alternate | 0 | ZBTB7C |
| 45664950 | | | | |
| chr13: 100619800- | Gain | Alternate | 0 | ZIC5 |
| 100623100 | | | | |
| chr2: 180425300- | Loss | Alternate | 0 | ZNF385B |
| 180426950 | | | | |
| chr19: 53539900- | Gain | Alternate | 0 | ZNF702P |
| 53541600 | | | | |

[0181] To explore the influence of alternative promoters on protein diversity, we identified 714 tumor-specific promoter alterations predicted to change N-terminal protein composition and also supported by both H3K4me3 and RNA-seq data. The vast majority of these alterations (>95%) were in-frame to that of the canonical protein. Of these, 47% (n=338) were predicted to cause gains of new N-terminal peptides in tumors (see Methods). To confirm protein-level expression of these N-terminal peptides in gastrointestinal cancer, we queried publically available peptide spectral data of 90 TCGA colorectal cancer (CRC) and 60 normal colon samples. CRC data was used for this analysis as large-scale proteomic data of primary GCs are not currently available, and because many GC somatic promoters are also observed in CRC (FIG. 2d). Among N-terminal peptides predicted to be gained in tumors, we confirmed protein expression of 33% (112/338) in the CRC data (Table 7), of which 51.8% were overexpressed in CRC samples relative to normal colon samples (FDR 10%). In a separate experiment, we further investigated if these N-terminal peptides also exhibit tumor overexpression in proteomic data from 3 GC cell lines and 1 normal gastric epithelial line (GES1) (Methods and Materials). Similar to the CRC data, 48% of the N-terminal peptides were overexpressed in the GC lines relative to normal GES1 gastric cells. Taken collectively, these analyses suggest that alternative promoters may contribute significantly towards proteomic diversity in gastrointestinal cancer.

TABLE 7
Spectral Counts from CRC samples of N terminal peptides
predicted to be gained in GC

| | | | Spectral |
|---|---|---|---|
| SEQ_ID_NO | Peptide | GeneId | Count |
| SEQ ID NO: 1 | IDNSQVESGSLEDDWDFLPPKK | ENSG00000179218.9 | 2602 |
| SEQ ID NO: 2 | FYALSASFEPFSNK | ENSG00000179218.9 | 2047 |
| SEQ ID NO: 3 | EQFLDGDGWTSR | ENSG00000179218.9 | 1370 |
| SEQ ID NO: 4 | IKDPDASKPEDWDER | ENSG00000179218.9 | 805 |
| SEQ ID NO: 5 | GDVTAQIALQPALK | ENSG00000112096.12 | 601 |
| SEQ ID NO: 6 | GISLNPEQWSQLK | ENSG00000113387.7 | 536 |
| SEQ ID NO: 7 | AYHSFLVEPISCHAWNK | ENSG00000130429.8 | 497 |
| SEQ ID NO: 8 | IAVQPGTVGPQGR | ENSG00000134871.13 | 468 |
| SEQ ID NO: 9 | VLAQNSGFDLQETLVK | ENSG00000146731.6 | 435 |
| SEQ ID NO: 10 | CKDDEFTHLYTLIVRPDNTYEVK | ENSG00000179218.9 | 424 |
| SEQ ID NO: 11 | AKIDDPTDSKPEDWDKPEHIPDP | ENSG00000179218.9 | 414 |
| | DAK | | |
| SEQ ID NO: 12 | VHVIFNYK | ENSG00000179218.9 | 396 |
| SEQ ID NO: 13 | HEQNIDCGGGYVK | ENSG00000179218.9 | 361 |
| SEQ ID NO: 14 | LIDFGLAR | ENSG00000065534.14 | 359 |
| SEQ ID NO: 15 | TWKPTLVILR | ENSG00000130429.8 | 358 |
| SEQ ID NO: 16 | AIWNVINWENVTER | ENSG00000112096.12 | 353 |
| SEQ ID NO: 17 | IDDPTDSKPEDWDKPEHIPDPDA | ENSG00000179218.9 | 323 |
| | K | | |
| SEQ ID NO: 18 | NVRPDYLK | ENSG00000112096.12 | 320 |
| SEQ ID NO: 19 | NSVSQISVLSGGK | ENSG00000130429.8 | 317 |
| SEQ ID NO: 20 | DGNVLLHEMQIQHPTASLIAK | ENSG00000146731.6 | 314 |
| SEQ ID NO: 21 | AGATHVER | ENSG00000145016.9 | 311 |
| SEQ ID NO: 22 | LVALLNTLDR | ENSG00000119383.15 | 298 |
| SEQ ID NO: 23 | HHAAYVNNLNVTEEK | ENSG00000112096.12 | 296 |
| SEQ ID NO: 24 | FYGDEEKDKGLQTSQDAR | ENSG00000179218.9 | 290 |
| SEQ ID NO: 25 | KVHVIFNYK | ENSG00000179218.9 | 283 |
| SEQ ID NO: 26 | GPLPAAPPVAPER | ENSG00000115310.13 | 282 |
| SEQ ID NO: 27 | VLLSALER | ENSG00000100714.11 | 277 |
| SEQ ID NO: 28 | SVSIGYLLVK | ENSG00000134871.13 | 276 |
| SEQ ID NO: 29 | IQQEIAVQNPLVSER | ENSG00000167770.7 | 271 |
| SEQ ID NO: 30 | GELLEAIKR | ENSG00000112096.12 | 268 |
| SEQ ID NO: 31 | AHNQDLGLAGSCLAR | ENSG00000134871.13 | 265 |
| SEQ ID NO: 32 | YVVVTGITPTPLGEGK | ENSG00000100714.11 | 256 |
| SEQ ID NO: 33 | MEDLDQSPLVSSSDSPPRPQPAF | ENSG00000115310.13 | 254 |
| | K | | |
| SEQ ID NO: 34 | AAQAPSSFQLLYDLK | ENSG00000100714.11 | 253 |
| SEQ ID NO: 35 | LQAQLNELQAQLSQK | ENSG00000137497.13 | 250 |
| SEQ ID NO: 36 | ALQFLEEVK | ENSG00000146731.6 | 244 |
| SEQ ID NO: 37 | LLTSGYLQR | ENSG00000167770.7 | 242 |
| SEQ ID NO: 38 | GDLNDCFIPCTPK | ENSG00000100714.11 | 241 |
| SEQ ID NO: 39 | ASSEGGTAAGAGLDSLHK | ENSG00000130429.8 | 240 |
| SEQ ID NO: 40 | EAVTEILGIEPDREK | ENSG00000211460.7 | 236 |
| SEQ ID NO: 41 | EVEERPAPTPWGSK | ENSG00000130429.8 | 235 |
| SEQ ID NO: 42 | IITEGFEAAK | ENSG00000146731.6 | 235 |
| SEQ ID NO: 43 | YLNIFGESQPNPK | ENSG00000004864.9 | 234 |
| SEQ ID NO: 44 | LTAASVGVQGSGWGWLGFNK | ENSG00000112096.12 | 229 |
| SEQ ID NO: 45 | IAPLEEGTLPFNLAEAQR | ENSG00000004864.9 | 221 |
| SEQ ID NO: 46 | GQTLVVQFTVK | ENSG00000179218.9 | 220 |
| SEQ ID NO: 47 | AQLGVQAFADALLIIPK | ENSG00000146731.6 | 217 |
| SEQ ID NO: 48 | QVAPEKPVK | ENSG00000113387.7 | 217 |
| SEQ ID NO: 49 | VATAQDDITGDGTTSNVLIIGELL | ENSG00000146731.6 | 215 |
| | K | | |
| SEQ ID NO: 50 | GLLPQLLGVAPEK | ENSG00000004864.9 | 214 |
| SEQ ID NO: 51 | NAYVWTLK | ENSG00000130429.8 | 214 |
| SEQ ID NO: 52 | IYGADDIELLPEAQHK | ENSG00000100714.11 | 211 |
| SEQ ID NO: 53 | CHAIIDEQPLIFK | ENSG00000169756.12 | 210 |
| SEQ ID NO: 54 | KGISLNPEQWSQLK | ENSG00000113387.7 | 209 |
| SEQ ID NO: 55 | GIDPFSLDALSK | ENSG00000146731.6 | 207 |
| SEQ ID NO: 56 | LLQCYPPPEDAAVK | ENSG00000196961.8 | 207 |
| SEQ ID NO: 57 | GVPTGFILPIR | ENSG00000100714.11 | 204 |
| SEQ ID NO: 58 | IVTCGTDR | ENSG00000130429.8 | 204 |
| SEQ ID NO: 59 | TPVPSDIDISR | ENSG00000100714.11 | 203 |
| SEQ ID NO: 60 | YQEALAK | ENSG00000112096.12 | 198 |
| SEQ ID NO: 61 | VAWVSHDSTVCLADADKK | ENSG00000130429.8 | 197 |
| SEQ ID NO: 62 | LDIDPETITWQR | ENSG00000100714.11 | 194 |
| SEQ ID NO: 63 | IDNSQVESGSLEDDWDFLPPK | ENSG00000179218.9 | 192 |
| SEQ ID NO: 64 | LAILQVGNR | ENSG00000100714.11 | 192 |
| SEQ ID NO: 65 | AQAALAVNISAAR | ENSG00000146731.6 | 191 |
| SEQ ID NO: 66 | GALALAQAVQR | ENSG00000100714.11 | 189 |
| SEQ ID NO: 67 | TDPTTLTDEEINR | ENSG00000100714.11 | 189 |
| SEQ ID NO: 68 | LELSVLYK | ENSG00000167770.7 | 188 |
| SEQ ID NO: 69 | GLDGYQGPDGPR | ENSG00000134871.13 | 187 |
| SEQ ID NO: 70 | LSGLEQPQGALQTR | ENSG00000133316.11 | 184 |
| SEQ ID NO: 71 | SCQTALVEILDVIVR | ENSG00000067704.8 | 182 |
| SEQ ID NO: 72 | DDNMFQIGK | ENSG00000113387.7 | 181 |
| SEQ ID NO: 73 | EHNGQVTGIDWAPESNR | ENSG00000130429.8 | 179 |
| SEQ ID NO: 74 | KIKDPDASKPEDWDER | ENSG00000179218.9 | 178 |
| SEQ ID NO: 75 | MFGIPVVVAVNAFK | ENSG00000100714.11 | 178 |
| SEQ ID NO: 76 | FFEHFIEGGR | ENSG00000167770.7 | 177 |
| SEQ ID NO: 77 | IFHELTQTDK | ENSG00000100714.11 | 174 |
| SEQ ID NO: 78 | FINLFPETK | ENSG00000196961.8 | 172 |
| SEQ ID NO: 79 | FYGDEEKDK | ENSG00000179218.9 | 172 |
| SEQ ID NO: 80 | FNGGGHINHSIFWTNLSPNGGG | ENSG00000112096.12 | 169 |
| | EPK | | |
| SEQ ID NO: 81 | DPDASKPEDWDER | ENSG00000179218.9 | 168 |
| SEQ ID NO: 82 | LGSPDYGNSALLSLPGYRPTTR | ENSG00000137497.13 | 168 |
| SEQ ID NO: 83 | ASGDSARPVLLQVAESAYR | ENSG00000004864.9 | 167 |
| SEQ ID NO: 84 | TDTESELDLISR | ENSG00000100714.11 | 166 |
| SEQ ID NO: 85 | LDFVCSFLQK | ENSG00000137497.13 | 165 |
| SEQ ID NO: 86 | WIDETPPVDQPSR | ENSG00000119383.15 | 165 |
| SEQ ID NO: 87 | GLLGALTSTPYSPTQHLER | ENSG00000153310.14 | 164 |
| SEQ ID NO: 88 | KPEDWDEEMDGEWEPPVIQNP | ENSG00000179218.9 | 162 |
| | EYK | | |
| SEQ ID NO: 89 | FSDIQIR | ENSG00000100714.11 | 160 |
| SEQ ID NO: 90 | STSFNVQDLLPDHEYK | ENSG00000065534.14 | 160 |
| SEQ ID NO: 91 | GEQGFMGNTGPTGAVGDR | ENSG00000134871.13 | 159 |
| SEQ ID NO: 92 | QPSQGPTFGIK | ENSG00000100714.11 | 157 |
| SEQ ID NO: 93 | THLSLSHNPEQK | ENSG00000100714.11 | 157 |
| SEQ ID NO: 94 | APVPSTCSSTFPEELSPPSHQAK | ENSG00000137497.13 | 155 |
| SEQ ID NO: 95 | GEGGTTNPHIFPEGSEPK | ENSG00000167770.7 | 155 |
| SEQ ID NO: 96 | TALAEAELEYNPEHVSR | ENSG00000067704.8 | 155 |
| SEQ ID NO: 97 | FPLLKPSPK | ENSG00000067704.8 | 154 |
| SEQ ID NO: 98 | DQAANLMANR | ENSG00000198947.10 | 153 |
| SEQ ID NO: 99 | HLTAQVR | ENSG00000137497.13 | 153 |
| SEQ ID NO: | FVLSSGK | ENSG00000179218.9 | 149 |
| 100 | | | |
| SEQ ID NO: | SSLPPVLGTESDATVK | ENSG00000065534.14 | 148 |
| 101 | | | |
| SEQ ID NO: | AWGAVVPLVGK | ENSG00000153310.14 | 146 |
| 102 | | | |
| SEQ ID NO: | IEGYPDPEVVWFK | ENSG00000065534.14 | 145 |
| 103 | | | |
| SEQ ID NO: | GKNVLINK | ENSG00000179218.9 | 144 |
| 104 | | | |
| SEQ ID NO: | GLQTSQDAR | ENSG00000179218.9 | 144 |
| 105 | | | |
| SEQ ID NO: | HTLTQIK | ENSG00000146731.6 | 144 |
| 106 | | | |
| SEQ ID NO: | VHAELADVLTEAVVDSILAIK | ENSG00000146731.6 | 144 |
| 107 | | | |
| SEQ ID NO: | YVIHTVGPIAYGEPSASQAAELR | ENSG00000133315.6 | 142 |
| 108 | | | |
| SEQ ID NO: | IQSSHNFQLESVNK | ENSG00000135052.12 | 141 |
| 109 | | | |
| SEQ ID NO: | QIDNPDYK | ENSG00000179218.9 | 140 |
| 110 | | | |
| SEQ ID NO: | DAEGILEDLQSYR | ENSG00000153310.14 | 139 |
| 111 | | | |
| SEQ ID NO: | YTAESSDTLCPR | ENSG00000067704.8 | 139 |
| 112 | | | |
| SEQ ID NO: | EESREPAPASPAPAGVEIR | ENSG00000113657.8 | 138 |
| 113 | | | |
| SEQ ID NO: | EMDRETLIDVAR | ENSG00000146731.6 | 138 |
| 114 | | | |
| SEQ ID NO: | NEVSFVIHNLPVLAK | ENSG00000086475.10 | 138 |
| 115 | | | |
| SEQ ID NO: | QVAPEKPVKK | ENSG00000113387.7 | 137 |
| 116 | | | |
| SEQ ID NO: | FLINLEGGDIR | ENSG00000067704.8 | 136 |
| 117 | | | |
| SEQ ID NO: | LSVNSVTAGDYSR | ENSG00000211460.7 | 135 |
| 118 | | | |
| SEQ ID NO: | QAQVNLTVVDKPDPPAGTPCAS | ENSG00000065534.14 | 135 |
| 119 | DIR | | |
| SEQ ID NO: | IFDDVSSGVSQLASK | ENSG00000101199.8 | 134 |
| 120 | | | |
| SEQ ID NO: | PDASKPEDWDER | ENSG00000179218.9 | 134 |
| 121 | | | |
| SEQ ID NO: | YGGAPQALTLK | ENSG00000196961.8 | 132 |
| 122 | | | |
| SEQ ID NO: | LVTPGETPSWTGSGFVR | ENSG00000172037.9 | 131 |
| 123 | | | |
| SEQ ID NO: | EQISDIDDAVR | ENSG00000113387.7 | 129 |
| 124 | | | |
| SEQ ID NO: | KPAAGLSAAPVPTAPAAGAPLM | ENSG00000115310.13 | 129 |
| 125 | DFGNDFVPPAPR | | |
| SEQ ID NO: | ATSSTQSLAR | ENSG00000137497.13 | 128 |
| 126 | | | |
| SEQ ID NO: | LLVPTQFVGAIIGK | ENSG00000136231.9 | 128 |
| 127 | | | |
| SEQ ID NO: | GELLEAIK | ENSG00000112096.12 | 126 |
| 128 | | | |
| SEQ ID NO: | FFQPTEMAAQDFFQR | ENSG00000196961.8 | 124 |
| 129 | | | |
| SEQ ID NO: | GSGSRPGIEGDTPR | ENSG00000113657.8 | 121 |
| 130 | | | |
| SEQ ID NO: | NAIDDGCVVPGAGAVEVAMAE | ENSG00000146731.6 | 121 |
| 131 | ALIK | | |
| SEQ ID NO: | AAAAAAVGPGAGGAGSAVPGG | ENSG00000142453.7 | 120 |
| 132 | AGPCATVSVFPGAR | | |
| SEQ ID NO: | DFLTPPLLSVR | ENSG00000196961.8 | 120 |
| 133 | | | |
| SEQ ID NO: | LFVVPADEAQAR | ENSG00000105223.14 | 120 |
| 134 | | | |
| SEQ ID NO: | WMIQYNNLNLK | ENSG00000100714.11 | 120 |
| 135 | | | |
| SEQ ID NO: | SLPISLVFLVPVR | ENSG00000169896.12 | 119 |
| 136 | | | |
| SEQ ID NO: | ALQVGCLLR | ENSG00000196961.8 | 118 |
| 137 | | | |
| SEQ ID NO: | ESFNPESYELDK | ENSG00000086475.10 | 118 |
| 138 | | | |
| SEQ ID NO: | TGWISTSSIWK | ENSG00000067704.8 | 118 |
| 139 | | | |
| SEQ ID NO: | EYAEDDNIYQQK | ENSG00000167770.7 | 117 |
| 140 | | | |
| SEQ ID NO: | TQIAICPNNHEVHIYEK | ENSG00000130429.8 | 117 |
| 141 | | | |
| SEQ ID NO: | SLEAQVAHADQQLR | ENSG00000137497.13 | 116 |
| 142 | | | |
| SEQ ID NO: | SVTLLIK | ENSG00000146731.6 | 116 |
| 143 | | | |
| SEQ ID NO: | IHFVPGWDCHGLPIEIK | ENSG00000067704.8 | 115 |
| 144 | | | |
| SEQ ID NO: | QQPDTELEIQQK | ENSG00000067704.8 | 115 |
| 145 | | | |
| SEQ ID NO: | KGEPVSAEDLGVSGALTVLMK | ENSG00000100714.11 | 114 |
| 146 | | | |
| SEQ ID NO: | LGIGMDTCVIPLR | ENSG00000086475.10 | 113 |
| 147 | | | |
| SEQ ID NO: | QPSWDPSPVSSTVPAPSPLSAAA | ENSG00000115310.13 | 113 |
| 148 | VSPSK | | |
| SEQ ID NO: | QISEGVEYIHK | ENSG00000065534.14 | 109 |
| 149 | | | |
| SEQ ID NO: | SEGGTAAGAGLDSLHK | ENSG00000130429.8 | 108 |
| 150 | | | |
| SEQ ID NO: | PTGFILPIR | ENSG00000100714.11 | 107 |
| 151 | | | |
| SEQ ID NO: | SQAGVSSGAPPGR | ENSG00000137497.13 | 107 |
| 152 | | | |
| SEQ ID NO: | VCGDSDKGFVVINQK | ENSG00000146731.6 | 107 |
| 153 | | | |
| SEQ ID NO: | LGIVQGIVGAR | ENSG00000172037.9 | 104 |
| 154 | | | |
| SEQ ID NO: | FLSLPEVR | ENSG00000106066.9 | 103 |
| 155 | | | |
| SEQ ID NO: | GLVLDHGAR | ENSG00000146731.6 | 102 |
| 156 | | | |
| SEQ ID NO: | LKNQVTQLK | ENSG00000100714.11 | 102 |
| 157 | | | |
| SEQ ID NO: | TSVQFQNFSPTVVHPGDLQTQL | ENSG00000196961.8 | 102 |
| 158 | AVQTK | | |
| SEQ ID NO: | EPPYGADVLR | ENSG00000067704.8 | 101 |
| 159 | | | |
| SEQ ID NO: | AAGPLLTDECR | ENSG00000133315.6 | 100 |
| 160 | | | |
| SEQ ID NO: | IIEVAPQVATQNVNPTPGATS | ENSG00000086475.10 | 100 |
| 161 | | | |
| SEQ ID NO: | LFSQGQDVSNK | ENSG00000130396.16 | 100 |
| 162 | | | |
| SEQ ID NO: | VSGPWEEADAEAVAR | ENSG00000090006.13 | 100 |
| 163 | | | |
| SEQ ID NO: | VTGTQPITCTWMK | ENSG00000065534.14 | 100 |
| 164 | | | |
| SEQ ID NO: | VLIDIR | ENSG00000113387.7 | 99 |
| 165 | | | |
| SEQ ID NO: | AVLEEGTDVVIK | ENSG00000067704.8 | 98 |
| 166 | | | |
| SEQ ID NO: | QFAEILHFTLR | ENSG00000153310.14 | 97 |
| 167 | | | |
| SEQ ID NO: | IVGAPMHDLLLWNNATVTTCHS | ENSG00000100714.11 | 96 |
| 168 | K | | |
| SEQ ID NO: | AYIQENLELVEK | ENSG00000100714.11 | 95 |
| 169 | | | |
| SEQ ID NO: | EIGLLSEEVELYGETK | ENSG00000100714.11 | 95 |
| 170 | | | |
| SEQ ID NO: | DSFLGSIPGK | ENSG00000067704.8 | 94 |
| 171 | | | |
| SEQ ID NO: | QLDALLEALK | ENSG00000172037.9 | 94 |
| 172 | | | |
| SEQ ID NO: | IIDEDFELTER | ENSG00000065534.14 | 93 |
| 173 | | | |
| SEQ ID NO: | DTINLLDQR | ENSG00000135052.12 | 92 |
| 174 | | | |
| SEQ ID NO: | VVQSLEQTAR | ENSG00000211460.7 | 92 |
| 175 | | | |
| SEQ ID NO: | DDSNLYINVK | ENSG00000100714.11 | 90 |
| 176 | | | |
| SEQ ID NO: | VSGQPQSVTASSDK | ENSG00000101199.8 | 90 |
| 177 | | | |
| SEQ ID NO: | EFCQQEVEPMCK | ENSG00000167770.7 | 89 |
| 178 | | | |
| SEQ ID NO: | AGNSLAASTAEETAGSAQGR | ENSG00000172037.9 | 88 |
| 179 | | | |
| SEQ ID NO: | EYWMDPEGEMKPGR | ENSG00000113387.7 | 88 |
| 180 | | | |
| SEQ ID NO: | LQSQLLSIEK | ENSG00000106976.14 | 88 |
| 181 | | | |
| SEQ ID NO: | AGESVELFGK | ENSG00000065534.14 | 86 |
| 182 | | | |
| SEQ ID NO: | NGEFFMSPNDFVTR | ENSG00000004864.9 | 86 |
| 183 | | | |
| SEQ ID NO: | VVVGAPQEIVAANQR | ENSG00000169896.12 | 86 |
| 184 | | | |
| SEQ ID NO: | SQAPLESSLDSLGDVFLDSGRK | ENSG00000137497.13 | 85 |
| 185 | | | |
| SEQ ID NO: | GCLELIK | ENSG00000100714.11 | 84 |
| 186 | | | |
| SEQ ID NO: | HSQTDQEPMCPVGMNK | ENSG00000134871.13 | 84 |
| 187 | | | |
| SEQ ID NO: | NPQVCGPGR | ENSG00000090006.13 | 83 |
| 188 | | | |
| SEQ ID NO: | SRGPGAPCQDVDECAR | ENSG00000090006.13 | 83 |
| 189 | | | |
| SEQ ID NO: | TKDEYLINSQTTEHIVK | ENSG00000067704.8 | 83 |
| 190 | | | |
| SEQ ID NO: | IATTTASAATAAAIGATPR | ENSG00000137497.13 | 82 |
| 191 | | | |
| SEQ ID NO: | LGHELQQAGLK | ENSG00000137497.13 | 82 |
| 192 | | | |
| SEQ ID NO: | TEVPPLLLILDR | ENSG00000136631.8 | 82 |
| 193 | | | |
| SEQ ID NO: | YGDEEKDK | ENSG00000179218.9 | 82 |
| 194 | | | |
| SEQ ID NO: | SESQGTAPAFK | ENSG00000065534.14 | 81 |
| 195 | | | |
| SEQ ID NO: | LPQEPGREQVVEDRPVGGR | ENSG00000135052.12 | 80 |
| 196 | | | |
| SEQ ID NO: | LPYGGQCRPCPCPEGPGSQR | ENSG00000172037.9 | 79 |
| 197 | | | |
| SEQ ID NO: | VYLLYRPGHYDILYK | ENSG00000167770.7 | 79 |
| 198 | | | |
| SEQ ID NO: | FQVATDALK | ENSG00000137497.13 | 78 |
| 199 | | | |
| SEQ ID NO: | LQEGQTLEFLVASVPK | ENSG00000172037.9 | 78 |
| 200 | | | |
| SEQ ID NO: | LQGAVCGVSSGPPPPR | ENSG00000011028.9 | 78 |
| 201 | | | |
| SEQ ID NO: | IQNVVTSFAPQR | ENSG00000172037.9 | 77 |
| 202 | | | |
| SEQ ID NO: | VSTLQNQR | ENSG00000169896.12 | 77 |
| 203 | | | |
| SEQ ID NO: | LSQLEEHLSQLQDNPPQEK | ENSG00000137497.13 | 76 |
| 204 | | | |
| SEQ ID NO: | SQAPLESSLDSLGDVFLDSGR | ENSG00000137497.13 | 76 |
| 205 | | | |
| SEQ ID NO: | AGPDLASCLDVDECR | ENSG00000090006.13 | 75 |
| 206 | | | |
| SEQ ID NO: | GTCHYYANK | ENSG00000134871.13 | 74 |
| 207 | | | |
| SEQ ID NO: | HKSETDTSLIR | ENSG00000146731.6 | 74 |
| 208 | | | |
| SEQ ID NO: | KQQNQELQEQLR | ENSG00000137497.13 | 74 |
| 209 | | | |
| SEQ ID NO: | SGDLYVLAADK | ENSG00000067704.8 | 74 |
| 210 | | | |
| SEQ ID NO: | AFGFSHLEALLDDSK | ENSG00000167770.7 | 73 |
| 211 | | | |
| SEQ ID NO: | EILTLLQGVHQGAGFQDIPK | ENSG00000211460.7 | 73 |
| 212 | | | |
| SEQ ID NO: | IQQCPGTETAEYQSLCPHGR | ENSG00000090006.13 | 73 |
| 213 | | | |
| SEQ ID NO: | KDPDASKPEDWDER | ENSG00000179218.9 | 73 |
| 214 | | | |
| SEQ ID NO: | SYWLSTTAPLPMMPVAEDEIKPY | ENSG00000134871.13 | 73 |
| 215 | ISR | | |
| SEQ ID NO: | VPQDVLQK | ENSG00000086475.10 | 73 |
| 216 | | | |
| SEQ ID NO: | DFGSFDKFK | ENSG00000112096.12 | 72 |
| 217 | | | |
| SEQ ID NO: | FIILSQEGSLCSVSIEK | ENSG00000065534.14 | 72 |
| 218 | | | |
| SEQ ID NO: | LAVATFAGIENK | ENSG00000004864.9 | 72 |
| 219 | | | |
| SEQ ID NO: | RLENAGSLK | ENSG00000065534.14 | 72 |
| 220 | | | |
| SEQ ID NO: | AAMPPQIIQFPEDQK | ENSG00000065534.14 | 71 |
| 221 | | | |
| SEQ ID NO: | EAQNLSAMEIR | ENSG00000067704.8 | 71 |
| 222 | | | |
| SEQ ID NO: | ILVAGDSMDSVK | ENSG00000196961.8 | 71 |
| 223 | | | |
| SEQ ID NO: | LVHSYPYDWR | ENSG00000067704.8 | 71 |
| 224 | | | |
| SEQ ID NO: | AEAGDAALSVAEWLR | ENSG00000186635.10 | 70 |
| 225 | | | |
| SEQ ID NO: | ELSNFYFSIIK | ENSG00000067704.8 | 70 |
| 226 | | | |
| SEQ ID NO: | AEAAAPYTVLAQSAPR | ENSG00000090006.13 | 69 |
| 227 | | | |
| SEQ ID NO: | GPGAPCQDVDECAR | ENSG00000090006.13 | 69 |
| 228 | | | |
| SEQ ID NO: | VSDFYDIEER | ENSG00000065534.14 | 69 |
| 229 | | | |
| SEQ ID NO: | NNDFYVTGESYAGK | ENSG00000106066.9 | 68 |
| 230 | | | |
| SEQ ID NO: | QPVVDTFDIR | ENSG00000142453.7 | 68 |
| 231 | | | |
| SEQ ID NO: | QQLQALSEPQPR | ENSG00000135052.12 | 68 |
| 232 | | | |
| SEQ ID NO: | APAEILNGKEISAQIR | ENSG00000100714.11 | 67 |
| 233 | | | |
| SEQ ID NO: | KLDVEEPDSANSSFYSTR | ENSG00000137497.13 | 67 |
| 234 | | | |
| SEQ ID NO: | QPPPDSSEEAPPATQNFIIPK | ENSG00000119383.15 | 67 |
| 235 | | | |
| SEQ ID NO: | SLADVDAILAR | ENSG00000172037.9 | 67 |
| 236 | | | |
| SEQ ID NO: | TGGSAQPETPYSGPGLLIDSLVLL | ENSG00000172037.9 | 67 |
| 237 | PR | | |
| SEQ ID NO: | CDLCQEVLADIGFVK | ENSG00000169756.12 | 66 |
| 238 | | | |
| SEQ ID NO: | FIAGTGCLVR | ENSG00000184207.8 | 66 |
| 239 | | | |
| SEQ ID NO: | HHAAYVNNLNVTEEKYQEALAK | ENSG00000112096.12 | 66 |
| 240 | | | |
| SEQ ID NO: | QGIVHLDLKPENIMCVNK | ENSG00000065534.14 | 66 |
| 241 | | | |
| SEQ ID NO: | TLGDQLSLLLGAR | ENSG00000011028.9 | 66 |
| 242 | | | |
| SEQ ID NO: | CTHWAEGGK | ENSG00000100714.11 | 65 |
| 243 | | | |
| SEQ ID NO: | FGLYLPLFKPSVSTSK | ENSG00000004864.9 | 65 |
| 244 | | | |
| SEQ ID NO: | GSCYPATGDLLVGR | ENSG00000172037.9 | 65 |
| 245 | | | |
| SEQ ID NO: | VMPLIIQGFK | ENSG00000086475.10 | 65 |
| 246 | | | |
| SEQ ID NO: | TPLWIGLAGEEGSR | ENSG00000011028.9 | 64 |
| 247 | | | |
| SEQ ID NO: | TQPDGTSVPGEPASPISQR | ENSG00000137497.13 | 64 |
| 248 | | | |
| SEQ ID NO: | VWGVPIPVFHHK | ENSG00000067704.8 | 64 |
| 249 | | | |
| SEQ ID NO: | ALLNVVDNAR | ENSG00000105223.14 | 63 |
| 250 | | | |
| SEQ ID NO: | GGTTNPHIFPEGSEPK | ENSG00000167770.7 | 63 |
| 251 | | | |
| SEQ ID NO: | YTVNFLEAK | ENSG00000142453.7 | 63 |
| 252 | | | |
| SEQ ID NO: | ATIQGVLR | ENSG00000196961.8 | 62 |
| 253 | | | |
| SEQ ID NO: | GPLGDQYQTVK | ENSG00000172037.9 | 62 |
| 254 | | | |
| SEQ ID NO: | VAAQVDGGAQVQQVLNIECLR | ENSG00000196961.8 | 62 |
| 255 | | | |
| SEQ ID NO: | FTPVVCGLR | ENSG00000090006.13 | 61 |
| 256 | | | |
| SEQ ID NO: | LFPNSLDQTDMHGDSEYNIMFG | ENSG00000179218.9 | 61 |
| 257 | PDICGPGTK | | |
| SEQ ID NO: | TILLSTTDPADFAVAEALEK | ENSG00000130396.16 | 61 |
| 258 | | | |
| SEQ ID NO: | LTYLGCASVNAPR | ENSG00000011454.12 | 60 |
| 259 | | | |
| SEQ ID NO: | SCYLSSLDLLLEHR | ENSG00000133315.6 | 60 |
| 260 | | | |
| SEQ ID NO: | VVATTQMQAADAR | ENSG00000166825.9 | 60 |
| 261 | | | |
| SEQ ID NO: | GVGGSQPPDIDKTELVEPTEYLV | ENSG00000166825.9 | 59 |
| 262 | VHLK | | |
| SEQ ID NO: | KEIHTVPDMGK | ENSG00000119383.15 | 59 |
| 263 | | | |
| SEQ ID NO: | LFTALFPFEK | ENSG00000169896.12 | 59 |
| 264 | | | |
| SEQ ID NO: | SLESALK | ENSG00000130429.8 | 59 |
| 265 | | | |
| SEQ ID NO: | VDDQIAIVFK | ENSG00000119383.15 | 59 |
| 266 | | | |
| SEQ ID NO: | VLDPAIPIPDPYSSR | ENSG00000172037.9 | 59 |
| 267 | | | |
| SEQ ID NO: | ATPFIECNGGR | ENSG00000134871.13 | 58 |
| 268 | | | |
| SEQ ID NO: | CSVCEAPAIAIAVHSQDVSIPHCP | ENSG00000134871.13 | 58 |
| 269 | AGWR | | |
| SEQ ID NO: | EAQVAHADQQLR | ENSG00000137497.13 | 58 |
| 270 | | | |
| SEQ ID NO: | EIILDDDECPLQIFR | ENSG00000130396.16 | 58 |
| 271 | | | |
| SEQ ID NO: | TPAAIPATPVAVSQPIR | ENSG00000130396.16 | 58 |
| 272 | | | |
| SEQ ID NO: | DLGFFGIYK | ENSG00000004864.9 | 57 |
| 273 | | | |
| SEQ ID NO: | EERPAPTPWGSK | ENSG00000130429.8 | 57 |
| 274 | | | |
| SEQ ID NO: | YVGFGNTPPPQK | ENSG00000101199.8 | 57 |
| 275 | | | |
| SEQ ID NO: | CLFQSPLFAK | ENSG00000142453.7 | 56 |
| 276 | | | |
| SEQ ID NO: | SETDTSLIR | ENSG00000146731.6 | 56 |
| 277 | | | |
| SEQ ID NO: | ILETWGELLSK | ENSG00000011454.12 | 54 |
| 278 | | | |
| SEQ ID NO: | YSGLCPHVVVLVATVR | ENSG00000100714.11 | 54 |
| 279 | | | |
| SEQ ID NO: | ENSLLFDPLSSSSSNK | ENSG00000166825.9 | 53 |
| 280 | | | |
| SEQ ID NO: | IKNEAEPEFASR | ENSG00000198947.10 | 53 |
| 281 | | | |
| SEQ ID NO: | VSAPDGPCPTGFER | ENSG00000090006.13 | 53 |
| 282 | | | |
| SEQ ID NO: | AQGIAQGAIR | ENSG00000172037.9 | 52 |
| 283 | | | |
| SEQ ID NO: | KVCGDSDKGFVVINQK | ENSG00000146731.6 | 52 |
| 284 | | | |
| SEQ ID NO: | LWSGYSLLYFEGQEK | ENSG00000134871.13 | 52 |
| 285 | | | |
| SEQ ID NO: | VPIWDQDIQFLPGSQK | ENSG00000133316.11 | 52 |
| 286 | | | |
| SEQ ID NO: | YLSYTLNPDLIR | ENSG00000166825.9 | 52 |
| 287 | | | |
| SEQ ID NO: | YVIGVGDAFR | ENSG00000169896.12 | 52 |
| 288 | | | |
| SEQ ID NO: | DLEVVEGSAAR | ENSG00000065534.14 | 51 |
| 289 | | | |
| SEQ ID NO: | FAVGSGSR | ENSG00000130429.8 | 50 |
| 290 | | | |
| SEQ ID NO: | GFGQSVVQLQGSR | ENSG00000169896.12 | 50 |
| 291 | | | |
| SEQ ID NO: | GLPGEVLGAQPGPR | ENSG00000134871.13 | 50 |
| 292 | | | |
| SEQ ID NO: | LAETLGR | ENSG00000169756.12 | 50 |
| 293 | | | |
| SEQ ID NO: | LPPKVESLESLYFTPIPAR | ENSG00000137497.13 | 50 |
| 294 | | | |
| SEQ ID NO: | PTDSKPEDWDKPEHIPDPDAK | ENSG00000179218.9 | 50 |
| 295 | | | |
| SEQ ID NO: | QLSLPQQEAQK | ENSG00000196961.8 | 50 |
| 296 | | | |
| SEQ ID NO: | DVTTFFSGK | ENSG00000101199.8 | 49 |
| 297 | | | |
| SEQ ID NO: | GQVEQANQELQELIQSVK | ENSG00000172037.9 | 49 |
| 298 | | | |
| SEQ ID NO: | IDDVLHTLTGAMSLLR | ENSG00000130396.16 | 49 |
| 299 | | | |
| SEQ ID NO: | LQLPNCIEDPVSPIVLR | ENSG00000169896.12 | 49 |
| 300 | | | |
| SEQ ID NO: | VESLESLYFTPIPAR | ENSG00000137497.13 | 49 |
| 301 | | | |
| SEQ ID NO: | FGDPLGYEDVIPEADREGVIR | ENSG00000169896.12 | 48 |
| 302 | | | |
| SEQ ID NO: | LEPNAQAQMYR | ENSG00000196961.8 | 48 |
| 303 | | | |
| SEQ ID NO: | DSLEDCVTIWGPEGR | ENSG00000011028.9 | 47 |
| 304 | | | |
| SEQ ID NO: | EAVTEILGIEPDR | ENSG00000211460.7 | 47 |
| 305 | | | |
| SEQ ID NO: | FQNLDKK | ENSG00000130429.8 | 47 |
| 306 | | | |
| SEQ ID NO: | GGECASPLPGLR | ENSG00000090006.13 | 47 |
| 307 | | | |
| SEQ ID NO: | IAVSKPSGPQPQADLQALLQSGA | ENSG00000105223.14 | 47 |
| 308 | QVR | | |
| SEQ ID NO: | VLELSIPASAEQIQHLAGAIAER | ENSG00000172037.9 | 47 |
| 309 | | | |
| SEQ ID NO: | AAPVPTAPAAGAPLMDFGNDFV | ENSG00000115310.13 | 46 |
| 310 | PPAPR | | |
| SEQ ID NO: | GGYTCVCPDGFLLDSSR | ENSG00000090006.13 | 46 |
| 311 | | | |
| SEQ ID NO: | VLLTRPGEGGTGLPGPPLITR | ENSG00000152894.10 | 46 |
| 312 | | | |
| SEQ ID NO: | ELQPQQQPR | ENSG00000130396.16 | 45 |
| 313 | | | |
| SEQ ID NO: | FCQLHSSGARPPAPAVPGLTR | ENSG00000090006.13 | 45 |
| 314 | | | |
| SEQ ID NO: | LAAGDQLLSVDGR | ENSG00000130396.16 | 45 |
| 315 | | | |
| SEQ ID NO: | SLTLDTWEPELLK | ENSG00000114331.8 | 45 |
| 316 | | | |
| SEQ ID NO: | EQVPGFTPR | ENSG00000100714.11 | 44 |
| 317 | | | |
| SEQ ID NO: | ETGVPIAGR | ENSG00000100714.11 | 44 |
| 318 | | | |
| SEQ ID NO: | KITIGQAPTEK | ENSG00000100714.11 | 44 |
| 319 | | | |
| SEQ ID NO: | FSTMPFLYCNPGDVCYYASR | ENSG00000134871.13 | 43 |
| 320 | | | |
| SEQ ID NO: | LLTIGDANGEIQR | ENSG00000142453.7 | 43 |
| 321 | | | |
| SEQ ID NO: | LQSQVISELDACK | ENSG00000132205.6 | 43 |
| 322 | | | |
| SEQ ID NO: | LTILAAR | ENSG00000065534.14 | 43 |
| 323 | | | |
| SEQ ID NO: | LVECLETVLNK | ENSG00000196961.8 | 43 |
| 324 | | | |
| SEQ ID NO: | SSPQFGVTLLTYELLQR | ENSG00000004864.9 | 43 |
| 325 | | | |
| SEQ ID NO: | YQCHEEGLVPSK | ENSG00000172037.9 | 43 |
| 326 | | | |
| SEQ ID NO: | GCQLCPPFGSEGFR | ENSG00000090006.13 | 42 |
| 327 | | | |
| SEQ ID NO: | KPGLEEAVESACAMR | ENSG00000067704.8 | 42 |
| 328 | | | |
| SEQ ID NO: | LVQCVDAFEEK | ENSG00000065534.14 | 42 |
| 329 | | | |
| SEQ ID NO: | QWFINITDIK | ENSG00000067704.8 | 42 |
| 330 | | | |
| SEQ ID NO: | SQLEAIFLR | ENSG00000105223.14 | 42 |
| 331 | | | |
| SEQ ID NO: | VLEGSELELAK | ENSG00000137497.13 | 42 |
| 332 | | | |
| SEQ ID NO: | VVQDLAAR | ENSG00000172037.9 | 42 |
| 333 | | | |
| SEQ ID NO: | AIMEFNPR | ENSG00000169896.12 | 41 |
| 334 | | | |
| SEQ ID NO: | ALAEGGSILSR | ENSG00000172037.9 | 41 |
| 335 | | | |
| SEQ ID NO: | EICPAGPGYHYSASDLR | ENSG00000090006.13 | 41 |
| 336 | | | |
| SEQ ID NO: | EQVVEDRPVGGR | ENSG00000135052.12 | 41 |
| 337 | | | |
| SEQ ID NO: | LYCNPGDVCYYASR | ENSG00000134871.13 | 41 |
| 338 | | | |
| SEQ ID NO: | TQDASGPELILPASIEFR | ENSG00000130396.16 | 41 |
| 339 | | | |
| SEQ ID NO: | YSEIEPSTEGEVIYR | ENSG00000172037.9 | 41 |
| 340 | | | |
| SEQ ID NO: | AWCVNCFACSTCNTK | ENSG00000169756.12 | 40 |
| 341 | | | |
| SEQ ID NO: | DDPTDSKPEDWDKPEHIPDPDA | ENSG00000179218.9 | 40 |
| 342 | K | | |
| SEQ ID NO: | IVQATTLLTMDK | ENSG00000130396.16 | 40 |
| 343 | | | |
| SEQ ID NO: | VDLSTSTDWK | ENSG00000133315.6 | 40 |
| 344 | | | |
| SEQ ID NO: | AQLLQQTR | ENSG00000213380.9 | 39 |
| 345 | | | |
| SEQ ID NO: | DVDECQLFR | ENSG00000090006.13 | 39 |
| 346 | | | |
| SEQ ID NO: | IEGYPDPEVVWFKDDQSIR | ENSG00000065534.14 | 39 |
| 347 | | | |
| SEQ ID NO: | LSSMAMISGLSGR | ENSG00000065534.14 | 39 |
| 348 | | | |
| SEQ ID NO: | NNGVLFENQLLQIGVK | ENSG00000196961.8 | 39 |
| 349 | | | |
| SEQ ID NO: | RADPAELR | ENSG00000004864.9 | 39 |
| 350 | | | |
| SEQ ID NO: | SAPASQASLR | ENSG00000137497.13 | 39 |
| 351 | | | |
| SEQ ID NO: | DWEQFEYK | ENSG00000137497.13 | 38 |
| 352 | | | |
| SEQ ID NO: | IQAELAVILK | ENSG00000137497.13 | 38 |
| 353 | | | |
| SEQ ID NO: | SNRDELELELAENRK | ENSG00000137497.13 | 38 |
| 354 | | | |
| SEQ ID NO: | TPVPEKVPPPKPATPDFR | ENSG00000065534.14 | 38 |
| 355 | | | |
| SEQ ID NO: | VSLEPHQGPGTPESK | ENSG00000137497.13 | 38 |
| 356 | | | |
| SEQ ID NO: | CTEPEDQLYYVK | ENSG00000106066.9 | 37 |
| 357 | | | |
| SEQ ID NO: | ECYFDTAAPDACDNILAR | ENSG00000090006.13 | 37 |
| 358 | | | |
| SEQ ID NO: | FGLGSVAGAVGATAVYPIDLVK | ENSG00000004864.9 | 37 |
| 359 | | | |
| SEQ ID NO: | GQEDAILSYEPVTR | ENSG00000082458.7 | 37 |
| 360 | | | |
| SEQ ID NO: | IMELEGR | ENSG00000135052.12 | 37 |
| 361 | | | |
| SEQ ID NO: | TCVSLAVSR | ENSG00000196961.8 | 37 |
| 362 | | | |
| SEQ ID NO: | TILTLTGVSTLGDVK | ENSG00000184207.8 | 37 |
| 363 | | | |
| SEQ ID NO: | VLQIVTNRDDVQGYAAK | ENSG00000196961.8 | 37 |
| 364 | | | |
| SEQ ID NO: | AFGFSHLEALLDDSKELQR | ENSG00000167770.7 | 36 |
| 365 | | | |
| SEQ ID NO: | AGPDSAGIALYSHEDVCVFK | ENSG00000142453.7 | 36 |
| 366 | | | |
| SEQ ID NO: | AQGVLAAQAR | ENSG00000172037.9 | 36 |
| 367 | | | |
| SEQ ID NO: | LPSFQQSCR | ENSG00000213380.9 | 36 |
| 368 | | | |
| SEQ ID NO: | MLSSFLSEDVFK | ENSG00000166825.9 | 36 |
| 369 | | | |
| SEQ ID NO: | DTEQTLYQVQER | ENSG00000172037.9 | 35 |
| 370 | | | |
| SEQ ID NO: | DVEVTKEEFVLAAQK | ENSG00000004864.9 | 35 |
| 371 | | | |
| SEQ ID NO: | INQLSEENGDLSFK | ENSG00000137497.13 | 35 |
| 372 | | | |
| SEQ ID NO: | LNIPATNVFANR | ENSG00000146733.9 | 35 |
| 373 | | | |
| SEQ ID NO: | SLVKPITQLLGR | ENSG00000169896.12 | 35 |
| 374 | | | |
| SEQ ID NO: | YLCEGTESPYQTGQLHPAIR | ENSG00000152894.10 | 35 |
| 375 | | | |
| SEQ ID NO: | ASMQPIQIAEGTGITTR | ENSG00000137497.13 | 34 |
| 376 | | | |
| SEQ ID NO: | IAGALGGLLTPLFLR | ENSG00000064545.10 | 34 |
| 377 | | | |
| SEQ ID NO: | LGASALDSIQEFR | ENSG00000032444.11 | 34 |
| 378 | | | |
| SEQ ID NO: | SGTIFDNFLITNDEAYAEEFGNET | ENSG00000179218.9 | 34 |
| 379 | WGVTK | | |
| SEQ ID NO: | TVLDLQSSLAGVSENLK | ENSG00000132205.6 | 34 |
| 380 | | | |
| SEQ ID NO: | AGPDLASCLDVDECRER | ENSG00000090006.13 | 33 |
| 381 | | | |
| SEQ ID NO: | EGGTAAGAGLDSLHK | ENSG00000130429.8 | 33 |
| 382 | | | |
| SEQ ID NO: | FYEFSQR | ENSG00000153310.14 | 33 |
| 383 | | | |
| SEQ ID NO: | GEWIKPGAIVIDCGINYVPDDK | ENSG00000100714.11 | 33 |
| 384 | | | |
| SEQ ID NO: | NDPYHPDHFNCANCGK | ENSG00000169756.12 | 33 |
| 385 | | | |
| SEQ ID NO: | SLEPHQGPGTPESK | ENSG00000137497.13 | 33 |
| 386 | | | |
| SEQ ID NO: | SLGEENFEVVK | ENSG00000132561.9 | 33 |
| 387 | | | |
| SEQ ID NO: | THIDTVINALK | ENSG00000196961.8 | 33 |
| 388 | | | |
| SEQ ID NO: | VHAELADVLTEAVVDSILAIKK | ENSG00000146731.6 | 33 |
| 389 | | | |
| SEQ ID NO: | VMQHQYQVSNLGQR | ENSG00000169896.12 | 33 |
| 390 | | | |
| SEQ ID NO: | ASFITPVPGGVGPMTVAMLMQ | ENSG00000100714.11 | 32 |
| 391 | STVESAK | | |
| SEQ ID NO: | FEHFIEGGR | ENSG00000167770.7 | 32 |
| 392 | | | |
| SEQ ID NO: | LQQAQLYPIAIFIKPK | ENSG00000082458.7 | 32 |
| 393 | | | |
| SEQ ID NO: | MTLADIER | ENSG00000004864.9 | 32 |
| 394 | | | |
| SEQ ID NO: | TVELLSGVVDQTK | ENSG00000004864.9 | 32 |
| 395 | | | |
| SEQ ID NO: | AMDYDLLLR | ENSG00000172037.9 | 31 |
| 396 | | | |
| SEQ ID NO: | DFGSFDK | ENSG00000112096.12 | 31 |
| 397 | | | |
| SEQ ID NO: | EPAVYFKEQFLDGDGWTSR | ENSG00000179218.9 | 31 |
| 398 | | | |
| SEQ ID NO: | FLINLEGGDIREESSYK | ENSG00000067704.8 | 31 |
| 399 | | | |
| SEQ ID NO: | GEWIKPGAIVIDCGINYVPDDKK | ENSG00000100714.11 | 31 |
| 400 | PNGR | | |
| SEQ ID NO: | HAVVVGR | ENSG00000100714.11 | 31 |
| 401 | | | |
| SEQ ID NO: | LEGDTFLLLIQSLK | ENSG00000104450.8 | 31 |
| 402 | | | |
| SEQ ID NO: | NTSVVDSEPVR | ENSG00000162614.14 | 31 |
| 403 | | | |
| SEQ ID NO: | PGTTDQVPR | ENSG00000113657.8 | 31 |
| 404 | | | |
| SEQ ID NO: | QLDQHLDLLK | ENSG00000172037.9 | 31 |
| 405 | | | |
| SEQ ID NO: | TVIVHGFTLGEK | ENSG00000067704.8 | 31 |
| 406 | | | |
| SEQ ID NO: | YAPDDIPNINSTCFK | ENSG00000130396.16 | 31 |
| 407 | | | |
| SEQ ID NO: | AADLLYAMCDR | ENSG00000196961.8 | 30 |
| 408 | | | |
| SEQ ID NO: | EMGEAFAADIPR | ENSG00000196961.8 | 30 |
| 409 | | | |
| SEQ ID NO: | IQGTLQPHAR | ENSG00000172037.9 | 30 |
| 410 | | | |
| SEQ ID NO: | LPIAVNGSLIYGVCAGK | ENSG00000059691.7 | 30 |
| 411 | | | |
| SEQ ID NO: | VNDDLISEFPHK | ENSG00000082458.7 | 30 |
| 412 | | | |
| SEQ ID NO: | DGGCSLPILR | ENSG00000090006.13 | 29 |
| 413 | | | |
| SEQ ID NO: | ENVDYIIQELR | ENSG00000136631.8 | 29 |
| 414 | | | |
| SEQ ID NO: | GAAVDEYFR | ENSG00000142453.7 | 29 |
| 415 | | | |
| SEQ ID NO: | GETAVPGAPEALR | ENSG00000184207.8 | 29 |
| 416 | | | |
| SEQ ID NO: | ILYSFATAFR | ENSG00000011454.12 | 29 |
| 417 | | | |
| SEQ ID NO: | NVFECNDQVVK | ENSG00000169896.12 | 29 |
| 418 | | | |
| SEQ ID NO: | STGSFVGELMYK | ENSG00000004864.9 | 29 |
| 419 | | | |
| SEQ ID NO: | TIRDLEVVEGSAAR | ENSG00000065534.14 | 29 |
| 420 | | | |
| SEQ ID NO: | TVFEALQAPACHENMVK | ENSG00000196961.8 | 29 |
| 421 | | | |
| SEQ ID NO: | VGLLQYGSTVK | ENSG00000132561.9 | 29 |
| 422 | | | |
| SEQ ID NO: | YVLSNQYRPDISPTER | ENSG00000130396.16 | 29 |
| 423 | | | |
| SEQ ID NO: | AEAELEYNPEHVSR | ENSG00000067704.8 | 28 |
| 424 | | | |
| SEQ ID NO: | ASPDLVPMGEWTAR | ENSG00000196961.8 | 28 |
| 425 | | | |
| SEQ ID NO: | CEACAPGHFGDPSRPGGR | ENSG00000172037.9 | 28 |
| 426 | | | |
| SEQ ID NO: | EDGYSDASGFGYCFR | ENSG00000090006.13 | 28 |
| 427 | | | |
| SEQ ID NO: | GDLIGVVEALTR | ENSG00000032444.11 | 28 |
| 428 | | | |
| SEQ ID NO: | LAILQVGNRDDSNLYINVK | ENSG00000100714.11 | 28 |
| 429 | | | |
| SEQ ID NO: | NDAGQAECSCQVTVDDAPASE | ENSG00000065534.14 | 28 |
| 430 | NTK | | |
| SEQ ID NO: | QNWFEAFEILDK | ENSG00000106066.9 | 28 |
| 431 | | | |
| SEQ ID NO: | SSEGLLATATVPLDLFK | ENSG00000157617.12 | 28 |
| 432 | | | |
| SEQ ID NO: | STTTIGLVQALGAHLYQNVFACV | ENSG00000100714.11 | 28 |
| 433 | R | | |
| SEQ ID NO: | VLVLEMFSGGDAAALER | ENSG00000172037.9 | 28 |
| 434 | | | |
| SEQ ID NO: | KQVAPEKPVK | ENSG00000113387.7 | 27 |
| 435 | | | |
| SEQ ID NO: | LQELEGTYEENER | ENSG00000172037.9 | 27 |
| 436 | | | |
| SEQ ID NO: | LVEQHGSDIWWTLPPEQLLPK | ENSG00000067704.8 | 27 |
| 437 | | | |
| SEQ ID NO: | NPTFMCLALHCIANVGSR | ENSG00000196961.8 | 27 |
| 438 | | | |
| SEQ ID NO: | SSDGRPDSGGTLR | ENSG00000130396.16 | 27 |
| 439 | | | |
| SEQ ID NO: | AAPQPLNLVSSVTLSK | ENSG00000114861.14 | 26 |
| 440 | | | |
| SEQ ID NO: | AVQAQGGESQQEAQR | ENSG00000137497.13 | 26 |
| 441 | | | |
| SEQ ID NO: | DFLNQEGADPDSIEMVATR | ENSG00000172037.9 | 26 |
| 442 | | | |
| SEQ ID NO: | GQVLDVVER | ENSG00000172037.9 | 26 |
| 443 | | | |
| SEQ ID NO: | LALIQPSR | ENSG00000146733.9 | 26 |
| 444 | | | |
| SEQ ID NO: | LQQDVLQFQK | ENSG00000135052.12 | 26 |
| 445 | | | |
| SEQ ID NO: | LTFEELER | ENSG00000162614.14 | 26 |
| 446 | | | |
| SEQ ID NO: | QVTPLFIHFR | ENSG00000166825.9 | 26 |
| 447 | | | |
| SEQ ID NO: | SFNVQDLLPDHEYK | ENSG00000065534.14 | 26 |
| 448 | | | |
| SEQ ID NO: | SSCISQHVISEAK | ENSG00000090006.13 | 26 |
| 449 | | | |
| SEQ ID NO: | VLQIVTNR | ENSG00000196961.8 | 26 |
| 450 | | | |
| SEQ ID NO: | VVGDVAYDEAK | ENSG00000100714.11 | 26 |
| 451 | | | |
| SEQ ID NO: | ALQSGPPQSR | ENSG00000136231.9 | 25 |
| 452 | | | |
| SEQ ID NO: | ITIGQAPTEK | ENSG00000100714.11 | 25 |
| 453 | | | |
| SEQ ID NO: | KAQGVLAAQAR | ENSG00000172037.9 | 25 |
| 454 | | | |
| SEQ ID NO: | LKENLYPYLGPSTLR | ENSG00000136631.8 | 25 |
| 455 | | | |
| SEQ ID NO: | LPVTINK | ENSG00000196961.8 | 25 |
| 456 | | | |
| SEQ ID NO: | SILTAIPNDDPYFHITK | ENSG00000213380.9 | 25 |
| 457 | | | |
| SEQ ID NO: | SLGNVIHPDVVVNGGQDQSK | ENSG00000067704.8 | 25 |
| 458 | | | |
| SEQ ID NO: | AVQTSIATAYR | ENSG00000114331.8 | 24 |
| 459 | | | |
| SEQ ID NO: | DASKPEDWDER | ENSG00000179218.9 | 24 |
| 460 | | | |
| SEQ ID NO: | IPVSGPFLVK | ENSG00000136231.9 | 24 |
| 461 | | | |
| SEQ ID NO: | LLGPAGLTWER | ENSG00000138162.13 | 24 |
| 462 | | | |
| SEQ ID NO: | LPVEAFSAVFTK | ENSG00000032444.11 | 24 |
| 463 | | | |
| SEQ ID NO: | SEESTTVHSSPGATGTALFPTR | ENSG00000205277.5 | 24 |
| 464 | | | |
| SEQ ID NO: | SEESTTVHSSPGATGTALFPTR | ENSG00000205277.5 | 24 |
| 465 | | | |
| SEQ ID NO: | SEESTTVHSSPGATGTALFPTR | ENSG00000205277.5 | 24 |
| 466 | | | |
| SEQ ID NO: | TKVHAELADVLTEAVVDSILAIK | ENSG00000146731.6 | 24 |
| 467 | | | |
| SEQ ID NO: | YGEGHQAWIIGIVEK | ENSG00000086475.10 | 24 |
| 468 | | | |
| SEQ ID NO: | ADLYLEGK | ENSG00000067704.8 | 23 |
| 469 | | | |
| SEQ ID NO: | CLEEKNEILQGK | ENSG00000137497.13 | 23 |
| 470 | | | |
| SEQ ID NO: | FIFDCVSQEYGINPER | ENSG00000184207.8 | 23 |
| 471 | | | |
| SEQ ID NO: | IHGTEEGQQILK | ENSG00000137497.13 | 23 |
| 472 | | | |
| SEQ ID NO: | KIQTQLQR | ENSG00000166825.9 | 23 |
| 473 | | | |
| SEQ ID NO: | KVVGDVAYDEAK | ENSG00000100714.11 | 23 |
| 474 | | | |
| SEQ ID NO: | LDSISGNLQR | ENSG00000132205.6 | 23 |
| 475 | | | |
| SEQ ID NO: | LFEDLEFQQLER | ENSG00000019144.12 | 23 |
| 476 | | | |
| SEQ ID NO: | SLGNVIHPDVVVNGGQDQSKEP | ENSG00000067704.8 | 23 |
| 477 | PYGADVLR | | |
| SEQ ID NO: | TEVNSGFFYK | ENSG00000146731.6 | 23 |
| 478 | | | |
| SEQ ID NO: | TSAGTFPGSQPQAPASPVLPARP | ENSG00000090006.13 | 23 |
| 479 | PPPPLPR | | |
| SEQ ID NO: | VHSPQQVDFR | ENSG00000065534.14 | 23 |
| 480 | | | |
| SEQ ID NO: | VLTGNTIALVLGGGGAR | ENSG00000032444.11 | 23 |
| 481 | | | |
| SEQ ID NO: | VSALSVVR | ENSG00000004864.9 | 23 |
| 482 | | | |
| SEQ ID NO: | ASLENGVLLCDLINK | ENSG00000136153.15 | 22 |
| 483 | | | |
| SEQ ID NO: | ETLIDVAR | ENSG00000146731.6 | 22 |
| 484 | | | |
| SEQ ID NO: | FESKPQSQEVK | ENSG00000065534.14 | 22 |
| 485 | | | |
| SEQ ID NO: | GHLQIAACPNQDPLQGTTGLIPL | ENSG00000112096.12 | 22 |
| 486 | LGIDVWEHAYYLQYK | | |
| SEQ ID NO: | GICEALEDSDGRQDSPAGELPK | ENSG00000132561.9 | 22 |
| 487 | | | |
| SEQ ID NO: | GYLAPSGDLSLR | ENSG00000090006.13 | 22 |
| 488 | | | |
| SEQ ID NO: | LQSQLLSIEKEVEEYK | ENSG00000106976.14 | 22 |
| 489 | | | |
| SEQ ID NO: | SGQGSDRGSGSRPGIEGDTPR | ENSG00000113657.8 | 22 |
| 490 | | | |
| SEQ ID NO: | VAISTFQK | ENSG00000213380.9 | 22 |
| 491 | | | |
| SEQ ID NO: | GQDIFIIQTIPR | ENSG00000161542.12 | 21 |
| 492 | | | |
| SEQ ID NO: | ITLDAQDVLAHLVQMAFK | ENSG00000130396.16 | 21 |
| 493 | | | |
| SEQ ID NO: | RTEVPPLLLILDR | ENSG00000136631.8 | 21 |
| 494 | | | |
| SEQ ID NO: | SSPPVQFSLLHSK | ENSG00000196961.8 | 21 |
| 495 | | | |
| SEQ ID NO: | SSTGSPTSPLNAEK | ENSG00000065534.14 | 21 |
| 496 | | | |
| SEQ ID NO: | TKFPAEQYYR | ENSG00000211460.7 | 21 |
| 497 | | | |
| SEQ ID NO: | ANFWYQPSFHGVDLSALR | ENSG00000142453.7 | 20 |
| 498 | | | |
| SEQ ID NO: | DAQIAMMQQR | ENSG00000137497.13 | 20 |
| 499 | | | |
| SEQ ID NO: | EHGAFDAVK | ENSG00000100714.11 | 20 |
| 500 | | | |
| SEQ ID NO: | GLAQADGTLITCVDSGILR | ENSG00000133316.11 | 20 |
| 501 | | | |
| SEQ ID NO: | GLNCEQCQDFYR | ENSG00000172037.9 | 20 |
| 502 | | | |
| SEQ ID NO: | KVVATTQMQAADAR | ENSG00000166825.9 | 20 |
| 503 | | | |
| SEQ ID NO: | MKLTHSLQEELEK | ENSG00000151914.13 | 20 |
| 504 | | | |
| SEQ ID NO: | NIDVFNVEDQKR | ENSG00000135052.12 | 20 |
| 505 | | | |
| SEQ ID NO: | QASDKDDRPFQGEDVENSR | ENSG00000130396.16 | 20 |
| 506 | | | |
| SEQ ID NO: | SLDQTDMHGDSEYNIMFGPDIC | ENSG00000179218.9 | 20 |
| 507 | GPGTK | | |
| SEQ ID NO: | STIFHSSPDASGTTPSSAHSTTSG | ENSG00000205277.5 | 20 |
| 508 | R | | |
| SEQ ID NO: | STIFHSSPDASGTTPSSAHSTTSG | ENSG00000205277.5 | 20 |
| 509 | R | | |
| SEQ ID NO: | STIFHSSPDASGTTPSSAHSTTSG | ENSG00000205277.5 | 20 |
| 510 | R | | |
| SEQ ID NO: | STIFHSSPDASGTTPSSAHSTTSG | ENSG00000205277.5 | 20 |
| 511 | R | | |
| SEQ ID NO: | VCLHVQK | ENSG00000169896.12 | 20 |
| 512 | | | |
| SEQ ID NO: | VSQFLQVLETDLYR | ENSG00000213380.9 | 20 |
| 513 | | | |
| SEQ ID NO: | VSSTATTQDVIETLAEK | ENSG00000130396.16 | 20 |
| 514 | | | |
| SEQ ID NO: | YNTRPLGQEPPR | ENSG00000090006.13 | 20 |
| 515 | | | |
| SEQ ID NO: | ANHPMDAEVTK | ENSG00000196961.8 | 19 |
| 516 | | | |
| SEQ ID NO: | ASELGHSLNENVLKPAQEK | ENSG00000101199.8 | 19 |
| 517 | | | |
| SEQ ID NO: | AWVSHDSTVCLADADKK | ENSG00000130429.8 | 19 |
| 518 | | | |
| SEQ ID NO: | FSYDLSQCINQMK | ENSG00000135052.12 | 19 |
| 519 | | | |
| SEQ ID NO: | IYQFTAASPK | ENSG00000005020.8 | 19 |
| 520 | | | |
| SEQ ID NO: | KQDEPIDLFMIEIMEMK | ENSG00000146731.6 | 19 |
| 521 | | | |
| SEQ ID NO: | NIMAGLQQTNSEK | ENSG00000198947.10 | 19 |
| 522 | | | |
| SEQ ID NO: | RPDYLK | ENSG00000112096.12 | 19 |
| 523 | | | |
| SEQ ID NO: | SEESTTVHSSPVATATTPSPAR | ENSG00000205277.5 | 19 |
| 524 | | | |
| SEQ ID NO: | SEESTTVHSSPVATATTPSPAR | ENSG00000205277.5 | 19 |
| 525 | | | |
| SEQ ID NO: | SEESTTVHSSPVATATTPSPAR | ENSG00000205277.5 | 19 |
| 526 | | | |
| SEQ ID NO: | SEESTTVHSSPVATATTPSPAR | ENSG00000205277.5 | 19 |
| 527 | | | |
| SEQ ID NO: | THLTSLK | ENSG00000211460.7 | 19 |
| 528 | | | |
| SEQ ID NO: | AQEAEQLLR | ENSG00000172037.9 | 18 |
| 529 | | | |
| SEQ ID NO: | AQIINDAFNLASAHK | ENSG00000166825.9 | 18 |
| 530 | | | |
| SEQ ID NO: | DQLGGWFQSSLLTSVAAR | ENSG00000067704.8 | 18 |
| 531 | | | |
| SEQ ID NO: | GADDIELLPEAQHK | ENSG00000100714.11 | 18 |
| 532 | | | |
| SEQ ID NO: | GFSHLEALLDDSK | ENSG00000167770.7 | 18 |
| 533 | | | |
| SEQ ID NO: | GLLTDSPAATVLAEAR | ENSG00000019144.12 | 18 |
| 534 | | | |
| SEQ ID NO: | HSNFLGAYDSIR | ENSG00000172037.9 | 18 |
| 535 | | | |
| SEQ ID NO: | KNEFQGELEK | ENSG00000135052.12 | 18 |
| 536 | | | |
| SEQ ID NO: | SFLEEVLASGLHSR | ENSG00000136631.8 | 18 |
| 537 | | | |
| SEQ ID NO: | TEILGIEPDREK | ENSG00000211460.7 | 18 |
| 538 | | | |
| SEQ ID NO: | VILLDPSIIEAK | ENSG00000104450.8 | 18 |
| 539 | | | |
| SEQ ID NO: | AETVQAALEEAQR | ENSG00000172037.9 | 17 |
| 540 | | | |
| SEQ ID NO: | AFVENYPQFK | ENSG00000136631.8 | 17 |
| 541 | | | |
| SEQ ID NO: | DFISNLLK | ENSG00000065534.14 | 17 |
| 542 | | | |
| SEQ ID NO: | DGFFGLSISDR | ENSG00000172037.9 | 17 |
| 543 | | | |
| SEQ ID NO: | DHVFQVNNFEALK | ENSG00000169896.12 | 17 |
| 544 | | | |
| SEQ ID NO: | DPTDSKPEDWDKPEHIPDPDAK | ENSG00000179218.9 | 17 |
| 545 | | | |
| SEQ ID NO: | KIIELK | ENSG00000146731.6 | 17 |
| 546 | | | |
| SEQ ID NO: | LCCPVALAQDVTGALEDALAK | ENSG00000213380.9 | 17 |
| 547 | | | |
| SEQ ID NO: | PAIAHLIHSLNPVR | ENSG00000106066.9 | 17 |
| 548 | | | |
| SEQ ID NO: | PSSTPTTHFSASSTTLGR | ENSG00000205277.5 | 17 |
| 549 | | | |
| SEQ ID NO: | PSSTPTTHFSASSTTLGR | ENSG00000205277.5 | 17 |
| 550 | | | |
| SEQ ID NO: | PSSTPTTHFSASSTTLGR | ENSG00000205277.5 | 17 |
| 551 | | | |
| SEQ ID NO: | PSSTPTTHFSASSTTLGR | ENSG00000205277.5 | 17 |
| 552 | | | |
| SEQ ID NO: | PSSTPTTHFSASSTTLGR | ENSG00000205277.5 | 17 |
| 553 | | | |
| SEQ ID NO: | PSSTPTTHFSASSTTLGR | ENSG00000205277.5 | 17 |
| 554 | | | |
| SEQ ID NO: | PSSTPTTHFSASSTTLGR | ENSG00000205277.5 | 17 |
| 555 | | | |
| SEQ ID NO: | QFVTGIIDSLTISPK | ENSG00000132561.9 | 17 |
| 556 | | | |
| SEQ ID NO: | SEAVLQSPEFAIFR | ENSG00000198947.10 | 17 |
| 557 | | | |
| SEQ ID NO: | TTQGLTALLLSLK | ENSG00000136631.8 | 17 |
| 558 | | | |
| SEQ ID NO: | VPLSVQLKPEVSPTQDIR | ENSG00000125826.15 | 17 |
| 559 | | | |
| SEQ ID NO: | VTAIDFR | ENSG00000004864.9 | 17 |
| 560 | | | |
| SEQ ID NO: | YLIFPNPVCLEPGISYK | ENSG00000172037.9 | 17 |
| 561 | | | |
| SEQ ID NO: | YRLPNTLKPDSYR | ENSG00000166825.9 | 17 |
| 562 | | | |
| SEQ ID NO: | AFLLSLAALR | ENSG00000105223.14 | 16 |
| 563 | | | |
| SEQ ID NO: | DLAQYSSNDAVVETSLTK | ENSG00000114331.8 | 16 |
| 564 | | | |
| SEQ ID NO: | DRLPQEPGREQVVEDRPVGGR | ENSG00000135052.12 | 16 |
| 565 | | | |
| SEQ ID NO: | EAIQHPADEKLQEK | ENSG00000153310.14 | 16 |
| 566 | | | |
| SEQ ID NO: | EFQNNPNPR | ENSG00000169896.12 | 16 |
| 567 | | | |
| SEQ ID NO: | ELSAALQDKK | ENSG00000137497.13 | 16 |
| 568 | | | |
| SEQ ID NO: | ELSGSGLER | ENSG00000213380.9 | 16 |
| 569 | | | |
| SEQ ID NO: | ELWILNR | ENSG00000166825.9 | 16 |
| 570 | | | |
| SEQ ID NO: | FSTEYELQQLEQFKK | ENSG00000166825.9 | 16 |
| 571 | | | |
| SEQ ID NO: | GPALCGSQR | ENSG00000090006.13 | 16 |
| 572 | | | |
| SEQ ID NO: | GPLEPGPPKPGVPQEPGR | ENSG00000125826.15 | 16 |
| 573 | | | |
| SEQ ID NO: | GSLYQCDYSTGSCEPIR | ENSG00000169896.12 | 16 |
| 574 | | | |
| SEQ ID NO: | IQTQLQR | ENSG00000166825.9 | 16 |
| 575 | | | |
| SEQ ID NO: | KNSSIIGDYKQICSQLSER | ENSG00000011454.12 | 16 |
| 576 | | | |
| SEQ ID NO: | LEINFEELLK | ENSG00000162614.14 | 16 |
| 577 | | | |
| SEQ ID NO: | LIVPEPDVDFDAK | ENSG00000132205.6 | 16 |
| 578 | | | |
| SEQ ID NO: | LVGPEGFVVTEAGFGADIGMEK | ENSG00000100714.11 | 16 |
| 579 | | | |
| SEQ ID NO: | QEHCGCYTLLVENK | ENSG00000065534.14 | 16 |
| 580 | | | |
| SEQ ID NO: | RSQAGVSSGAPPGR | ENSG00000137497.13 | 16 |
| 581 | | | |
| SEQ ID NO: | SPGSTPTTHFPASSTTSGHSEK | ENSG00000205277.5 | 16 |
| 582 | | | |
| SEQ ID NO: | SPGSTPTTHFPASSTTSGHSEK | ENSG00000205277.5 | 16 |
| 583 | | | |
| SEQ ID NO: | SPGSTPTTHFPASSTTSGHSEK | ENSG00000205277.5 | 16 |
| 584 | | | |
| SEQ ID NO: | SPGSTPTTHFPASSTTSGHSEK | ENSG00000205277.5 | 16 |
| 585 | | | |
| SEQ ID NO: | VLSQIDVAQK | ENSG00000198947.10 | 16 |
| 586 | | | |
| SEQ ID NO: | YGGMFCNVEGAFESK | ENSG00000113657.8 | 16 |
| 587 | | | |
| SEQ ID NO: | ATVVVEATEPEPSGSIANPAASTS | ENSG00000131711.10 | 15 |
| 588 | PSLSHR | | |
| SEQ ID NO: | EMTADVIELK | ENSG00000067704.8 | 15 |
| 589 | | | |
| SEQ ID NO: | GEQGFMGNTGPTGAVGDRGPK | ENSG00000134871.13 | 15 |
| 590 | | | |
| SEQ ID NO: | LAEAELEYNPEHVSR | ENSG00000067704.8 | 15 |
| 591 | | | |
| SEQ ID NO: | LESEEDVSQAFLEAVAEEKPHVK | ENSG00000065534.14 | 15 |
| 592 | PYFSK | | |
| SEQ ID NO: | LMCELGNDVINR | ENSG00000114331.8 | 15 |
| 593 | | | |
| SEQ ID NO: | QQQDYWLIDVR | ENSG00000166825.9 | 15 |
| 594 | | | |
| SEQ ID NO: | SSEGGTAAGAGLDSLHK | ENSG00000130429.8 | 15 |
| 595 | | | |
| SEQ ID NO: | SYKPVFWSPSSR | ENSG00000067704.8 | 15 |
| 596 | | | |
| SEQ ID NO: | TAHLDEEVNKGDILVVATGQPE | ENSG00000100714.11 | 15 |
| 597 | MVK | | |
| SEQ ID NO: | TRPDGNCFYR | ENSG00000167770.7 | 15 |
| 598 | | | |
| SEQ ID NO: | TSGQCLCR | ENSG00000172037.9 | 15 |
| 599 | | | |
| SEQ ID NO: | AFCVANK | ENSG00000114331.8 | 14 |
| 600 | | | |
| SEQ ID NO: | AMISGLSGR | ENSG00000065534.14 | 14 |
| 601 | | | |
| SEQ ID NO: | AVESSKPLSNAQPSGPLKPVGN | ENSG00000065534.14 | 14 |
| 602 | | | |
| SEQ ID NO: | AYHSFLVEPISCHAWNKDR | ENSG00000130429.8 | 14 |
| 603 | | | |
| SEQ ID NO: | EGVVDIYNCVK | ENSG00000152894.10 | 14 |
| 604 | | | |
| SEQ ID NO: | GTWIHPEIDNPEYSPDPSIYAYD | ENSG00000179218.9 | 14 |
| 605 | NFGVLGLDLWQVK | | |
| SEQ ID NO: | HLTQAVCTVK | ENSG00000141447.12 | 14 |
| 606 | | | |
| SEQ ID NO: | ITISPLQELTLYNPER | ENSG00000136231.9 | 14 |
| 607 | | | |
| SEQ ID NO: | LACESASSTEVSGALK | ENSG00000169896.12 | 14 |
| 608 | | | |
| SEQ ID NO: | LDCTQCLQHPWLMK | ENSG00000065534.14 | 14 |
| 609 | | | |
| SEQ ID NO: | LDEEAENLVATVVPTHLAAAVPE | ENSG00000119383.15 | 14 |
| 610 | VAVYLK | | |
| SEQ ID NO: | LPEDDEPPARPPPPPPASVSPQA | ENSG00000115310.13 | 14 |
| 611 | EPVWTPPAPAPAAPPSTPAAPK | | |
| SEQ ID NO: | LPNTLKPDSYR | ENSG00000166825.9 | 14 |
| 612 | | | |
| SEQ ID NO: | LSSTQQSLAEK | ENSG00000082805.15 | 14 |
| 613 | | | |
| SEQ ID NO: | LVALETGIQK | ENSG00000019144.12 | 14 |
| 614 | | | |
| SEQ ID NO: | MHGGGPTVTAGLPLPK | ENSG00000100714.11 | 14 |
| 615 | | | |
| SEQ ID NO: | QQALELVVQEVSSVLR | ENSG00000157617.12 | 14 |
| 616 | | | |
| SEQ ID NO: | QSMAFSILNTPK | ENSG00000137497.13 | 14 |
| 617 | | | |
| SEQ ID NO: | SSNLLDLK | ENSG00000142453.7 | 14 |
| 618 | | | |
| SEQ ID NO: | VLQDQLK | ENSG00000135052.12 | 14 |
| 619 | | | |
| SEQ ID NO: | WVSHDSTVCLADADKK | ENSG00000130429.8 | 14 |
| 620 | | | |
| SEQ ID NO: | AAQLDGLEAR | ENSG00000172037.9 | 13 |
| 621 | | | |
| SEQ ID NO: | ANALASATCER | ENSG00000169756.12 | 13 |
| 622 | | | |
| SEQ ID NO: | ATDNEPSQFSEPR | ENSG00000132205.6 | 13 |
| 623 | | | |
| SEQ ID NO: | CGFSELYSWQR | ENSG00000067704.8 | 13 |
| 624 | | | |
| SEQ ID NO: | DLLQAAQDK | ENSG00000172037.9 | 13 |
| 625 | | | |
| SEQ ID NO: | EPAPASPAPAGVEIR | ENSG00000113657.8 | 13 |
| 626 | | | |
| SEQ ID NO: | EYELFEFR | ENSG00000136631.8 | 13 |
| 627 | | | |
| SEQ ID NO: | HKPGIVQETTFDLGGDIHSGTAL | ENSG00000130396.16 | 13 |
| 628 | PTSK | | |
| SEQ ID NO: | IWDLQGSEEPVFR | ENSG00000133316.11 | 13 |
| 629 | | | |
| SEQ ID NO: | LFGDVEASLGR | ENSG00000213380.9 | 13 |
| 630 | | | |
| SEQ ID NO: | LHTLGDNLLDPR | ENSG00000172037.9 | 13 |
| 631 | | | |
| SEQ ID NO: | RFSDIQIR | ENSG00000100714.11 | 13 |
| 632 | | | |
| SEQ ID NO: | SEVYGPMK | ENSG00000166825.9 | 13 |
| 633 | | | |
| SEQ ID NO: | SLSESAATR | ENSG00000159788.14 | 13 |
| 634 | | | |
| SEQ ID NO: | VTCVEMEPLAEYVVR | ENSG00000152894.10 | 13 |
| 635 | | | |
| SEQ ID NO: | YLFEEDNLLR | ENSG00000132561.9 | 13 |
| 636 | | | |
| SEQ ID NO: | AAECLDVDECHR | ENSG00000090006.13 | 12 |
| 637 | | | |
| SEQ ID NO: | AGMSSLKG | ENSG00000146731.6 | 12 |
| 638 | | | |
| SEQ ID NO: | ALASATCER | ENSG00000169756.12 | 12 |
| 639 | | | |
| SEQ ID NO: | CDSHDDPALGLVSGQCR | ENSG00000172037.9 | 12 |
| 640 | | | |
| SEQ ID NO: | DCSIALPYVCK | ENSG00000011028.9 | 12 |
| 641 | | | |
| SEQ ID NO: | DISLQGPGLAPEHCYIENLR | ENSG00000019144.12 | 12 |
| 642 | | | |
| SEQ ID NO: | FVLDHEDGLNLNEDLENFLQK | ENSG00000137497.13 | 12 |
| 643 | | | |
| SEQ ID NO: | GANQHATDEEGKDPLSIAVEAA | ENSG00000114331.8 | 12 |
| 644 | NADIVTLLR | | |
| SEQ ID NO: | GFSHLEALLDDSKELQR | ENSG00000167770.7 | 12 |
| 645 | | | |
| SEQ ID NO: | GSGVSNFAQLIVR | ENSG00000152894.10 | 12 |
| 646 | | | |
| SEQ ID NO: | IINDAFNLASAHK | ENSG00000166825.9 | 12 |
| 647 | | | |
| SEQ ID NO: | KVVQSLEQTAR | ENSG00000211460.7 | 12 |
| 648 | | | |
| SEQ ID NO: | QPAVEEPAEVTATVLASR | ENSG00000076662.5 | 12 |
| 649 | | | |
| SEQ ID NO: | QTQVLGLTQTCETLK | ENSG00000169896.12 | 12 |
| 650 | | | |
| SEQ ID NO: | RVEDAYILTCNVSLEYEK | ENSG00000146731.6 | 12 |
| 651 | | | |
| SEQ ID NO: | TLDFDALSVGQR | ENSG00000113657.8 | 12 |
| 652 | | | |
| SEQ ID NO: | VVNAMGK | ENSG00000169756.12 | 12 |
| 653 | | | |
| SEQ ID NO: | AKIDDPTDSKPEDWDKPEHIPD | ENSG00000179218.9 | 11 |
| 654 | | | |
| SEQ ID NO: | ALEQLLTELDDFLK | ENSG00000169129.10 | 11 |
| 655 | | | |
| SEQ ID NO: | ASKPEDWDER | ENSG00000179218.9 | 11 |
| 656 | | | |
| SEQ ID NO: | DLNQLFQQDSSSR | ENSG00000082805.15 | 11 |
| 657 | | | |
| SEQ ID NO: | ETPGRPPDPTGAPLPGPTGDPVK | ENSG00000032444.11 | 11 |
| 658 | PTSLETPSAPLLSR | | |
| SEQ ID NO: | GSACEEDVDECAQEPPPCGPGR | ENSG00000090006.13 | 11 |
| 659 | | | |
| SEQ ID NO: | KASSEGGTAAGAGLDSLHK | ENSG00000130429.8 | 11 |
| 660 | | | |
| SEQ ID NO: | LGFITNNSSK | ENSG00000184207.8 | 11 |
| 661 | | | |
| SEQ ID NO: | LPSHSDFLAELR | ENSG00000169896.12 | 11 |
| 662 | | | |
| SEQ ID NO: | LQDVHVAEGK | ENSG00000065534.14 | 11 |
| 663 | | | |
| SEQ ID NO: | LVTCTGYHQVR | ENSG00000133316.11 | 11 |
| 664 | | | |
| SEQ ID NO: | SIQLPTTVR | ENSG00000166825.9 | 11 |
| 665 | | | |
| SEQ ID NO: | VLSELGR | ENSG00000067704.8 | 11 |
| 666 | | | |
| SEQ ID NO: | WAPNENKFAVGSGSR | ENSG00000130429.8 | 11 |
| 667 | | | |
| SEQ ID NO: | AQELQQTGVLGAFESSFWHMQ | ENSG00000172037.9 | 10 |
| 668 | EK | | |
| SEQ ID NO: | ASAAAAAGGGATGHPGGGQGA | ENSG00000104450.8 | 10 |
| 669 | ENPAGLK | | |
| SEQ ID NO: | EAENFHEEDDVDVRPAR | ENSG00000162614.14 | 10 |
| 670 | | | |
| SEQ ID NO: | ERLPSHSDFLAELR | ENSG00000169896.12 | 10 |
| 671 | | | |
| SEQ ID NO: | EWSLESSPAQNWTPPQPR | ENSG00000101199.8 | 10 |
| 672 | | | |
| SEQ ID NO: | FYALSASFEPFSNKG | ENSG00000179218.9 | 10 |
| 673 | | | |
| SEQ ID NO: | GISLNPEQWSQLKEQISDIDDAV | ENSG00000113387.7 | 10 |
| 674 | R | | |
| SEQ ID NO: | HPLLVGHMPVMVAK | ENSG00000104728.11 | 10 |
| 675 | | | |
| SEQ ID NO: | IAHGNSSIIADR | ENSG00000100714.11 | 10 |
| 676 | | | |
| SEQ ID NO: | IYADSLKPNIPYK | ENSG00000130396.16 | 10 |
| 677 | | | |
| SEQ ID NO: | LAILDSQAGQIR | ENSG00000019144.12 | 10 |
| 678 | | | |
| SEQ ID NO: | NMVVDDDSPEMYK | ENSG00000162614.14 | 10 |
| 679 | | | |
| SEQ ID NO: | NRLDCTQCLQHPWLMK | ENSG00000065534.14 | 10 |
| 680 | | | |
| SEQ ID NO: | PVLLQVAESAYR | ENSG00000004864.9 | 10 |
| 681 | | | |
| SEQ ID NO: | QEPLGSDSEGVNCLAYDEAIMA | ENSG00000167770.7 | 10 |
| 682 | QQDR | | |
| SEQ ID NO: | QEVEELWIGLNDLK | ENSG00000011028.9 | 10 |
| 683 | | | |
| SEQ ID NO: | SFVIHNLPVLAK | ENSG00000086475.10 | 10 |
| 684 | | | |
| SEQ ID NO: | STTFHSSPR | ENSG00000205277.5 | 10 |
| 685 | | | |
| SEQ ID NO: | STTFHSSPR | ENSG00000205277.5 | 10 |
| 686 | | | |
| SEQ ID NO: | STTFHSSPR | ENSG00000205277.5 | 10 |
| 687 | | | |
| SEQ ID NO: | TAAGLMHTFNAHAATDITGFGIL | ENSG00000086475.10 | 10 |
| 688 | GHAQNLAK | | |
| SEQ ID NO: | TGAFGLR | ENSG00000172037.9 | 10 |
| 689 | | | |
| SEQ ID NO: | TSLTVVLLR | ENSG00000076662.5 | 10 |
| 690 | | | |
| SEQ ID NO: | VPPLLIYGPFGTGK | ENSG00000130589.12 | 10 |
| 691 | | | |
| SEQ ID NO: | VPSFAAGR | ENSG00000136231.9 | 10 |
| 692 | | | |
| SEQ ID NO: | VPVGDQPPDIEFQIR | ENSG00000106976.14 | 10 |
| 693 | | | |
| SEQ ID NO: | VYDPASPQR | ENSG00000133316.11 | 10 |
| 694 | | | |
| SEQ ID NO: | WFYIDFGGVKPMGSEPVPK | ENSG00000004864.9 | 10 |
| 695 | | | |
| SEQ ID NO: | WTPPAPAPAAPPSTPAAPK | ENSG00000115310.13 | 10 |
| 696 | | | |
| SEQ ID NO: | YDNQWFHGCTSTGR | ENSG00000011028.9 | 10 |
| 697 | | | |
| SEQ ID NO: | YFSYDCGADFPGVPLAPPR | ENSG00000172037.9 | 10 |
| 698 | | | |
| SEQ ID NO: | YGDEEKDKGLQTSQDAR | ENSG00000179218.9 | 10 |
| 699 | | | |
| SEQ ID NO: | YLETADYAIR | ENSG00000196961.8 | 10 |
| 700 | | | |
| SEQ ID NO: | AKQPDLAPGLTTIGASPTQTVTL | ENSG00000198947.10 | 9 |
| 701 | VTQPVVTK | | |
| SEQ ID NO: | ASPLLPANHVTMAK | ENSG00000067704.8 | 9 |
| 702 | | | |
| SEQ ID NO: | AVLELLQRPGNAR | ENSG00000105963.9 | 9 |
| 703 | | | |
| SEQ ID NO: | CFQVQGQEPQSR | ENSG00000011028.9 | 9 |
| 704 | | | |
| SEQ ID NO: | DKGLQTSQDAR | ENSG00000179218.9 | 9 |
| 705 | | | |
| SEQ ID NO: | DLTALSNMLPK | ENSG00000166825.9 | 9 |
| 706 | | | |
| SEQ ID NO: | DPFSLDALSK | ENSG00000146731.6 | 9 |
| 707 | | | |
| SEQ ID NO: | FGDPLGYEDVIPEADR | ENSG00000169896.12 | 9 |
| 708 | | | |
| SEQ ID NO: | FGLYLPLFK | ENSG00000004864.9 | 9 |
| 709 | | | |
| SEQ ID NO: | FSTEYELQQLEQFK | ENSG00000166825.9 | 9 |
| 710 | | | |
| SEQ ID NO: | GAVYLFHGTSGSGISPSHSQR | ENSG00000169896.12 | 9 |
| 711 | | | |
| SEQ ID NO: | HLCELLAQQF | ENSG00000196961.8 | 9 |
| 712 | | | |
| SEQ ID NO: | ILDQENLSSTALVK | ENSG00000169129.10 | 9 |
| 713 | | | |
| SEQ ID NO: | ISETTMLQSGMK | ENSG00000130396.16 | 9 |
| 714 | | | |
| SEQ ID NO: | ISYHGSCPQGLADSAWIPFR | ENSG00000011028.9 | 9 |
| 715 | | | |
| SEQ ID NO: | KQNWFEAFEILDK | ENSG00000106066.9 | 9 |
| 716 | | | |
| SEQ ID NO: | PISLVFLVPVR | ENSG00000169896.12 | 9 |
| 717 | | | |
| SEQ ID NO: | SKESSQVTSR | ENSG00000136631.8 | 9 |
| 718 | | | |
| SEQ ID NO: | SPPPCTYGR | ENSG00000090006.13 | 9 |
| 719 | | | |
| SEQ ID NO: | SQLNCLLLSGR | ENSG00000133316.11 | 9 |
| 720 | | | |
| SEQ ID NO: | TPLSAAAHTHPVYCVNVVGTQN | ENSG00000158560.10 | 9 |
| 721 | AHNLITVSTDGK | | |
| SEQ ID NO: | VNYDEENWR | ENSG00000166825.9 | 9 |
| 722 | | | |
| SEQ ID NO: | VSFVIHNLPVLAK | ENSG00000086475.10 | 9 |
| 723 | | | |
| SEQ ID NO: | VTLRPYLTPNDR | ENSG00000166825.9 | 9 |
| 724 | | | |
| SEQ ID NO: | WNVINWENVTER | ENSG00000112096.12 | 9 |
| 725 | | | |
| SEQ ID NO: | ADTDGGLIFR | ENSG00000163975.7 | 8 |
| 726 | | | |
| SEQ ID NO: | AGYTGLR | ENSG00000172037.9 | 8 |
| 727 | | | |
| SEQ ID NO: | AVESSKPLSNAQPSGPLKPVGNA | ENSG00000065534.14 | 8 |
| 728 | K | | |
| SEQ ID NO: | CSEGFVLAEDGRR | ENSG00000132561.9 | 8 |
| 729 | | | |
| SEQ ID NO: | DLMVLNDVYR | ENSG00000166825.9 | 8 |
| 730 | | | |
| SEQ ID NO: | FPAEQYYR | ENSG00000211460.7 | 8 |
| 731 | | | |
| SEQ ID NO: | FTGHCSCRPGVSGVR | ENSG00000172037.9 | 8 |
| 732 | | | |
| SEQ ID NO: | GDPGDTGAPGPVGMK | ENSG00000134871.13 | 8 |
| 733 | | | |
| SEQ ID NO: | GGPSLSSVLNELPSAATLR | ENSG00000167608.7 | 8 |
| 734 | | | |
| SEQ ID NO: | IKDPDASKPEDWDERAK | ENSG00000179218.9 | 8 |
| 735 | | | |
| SEQ ID NO: | ILCIGAVPGLQPR | ENSG00000110237.3 | 8 |
| 736 | | | |
| SEQ ID NO: | IQSDLTSHEISLEEMKK | ENSG00000198947.10 | 8 |
| 737 | | | |
| SEQ ID NO: | ITGHFYACQVAQR | ENSG00000136231.9 | 8 |
| 738 | | | |
| SEQ ID NO: | KVVGDVAYDEAKER | ENSG00000100714.11 | 8 |
| 739 | | | |
| SEQ ID NO: | LDTDILLGATCGLK | ENSG00000184207.8 | 8 |
| 740 | | | |
| SEQ ID NO: | LVSAVVEYGGK | ENSG00000136631.8 | 8 |
| 741 | | | |
| SEQ ID NO: | MLGVAAGMTHSNMANALASAT | ENSG00000169756.12 | 8 |
| 742 | CER | | |
| SEQ ID NO: | NIPNGLQEFLDPLCQR | ENSG00000130396.16 | 8 |
| 743 | | | |
| SEQ ID NO: | QADIIGKPSR | ENSG00000184207.8 | 8 |
| 744 | | | |
| SEQ ID NO: | QEISIMNCLHHPK | ENSG00000065534.14 | 8 |
| 745 | | | |
| SEQ ID NO: | QIVSEMLR | ENSG00000196961.8 | 8 |
| 746 | | | |
| SEQ ID NO: | RAEQLLQDAR | ENSG00000172037.9 | 8 |
| 747 | | | |
| SEQ ID NO: | RFENAPDSAK | ENSG00000082805.15 | 8 |
| 748 | | | |
| SEQ ID NO: | SGAPWFK | ENSG00000162614.14 | 8 |
| 749 | | | |
| SEQ ID NO: | SIVEHVASK | ENSG00000146733.9 | 8 |
| 750 | | | |
| SEQ ID NO: | SLVGLSQER | ENSG00000130396.16 | 8 |
| 751 | | | |
| SEQ ID NO: | TVNELQNLSSAEVVVPR | ENSG00000136231.9 | 8 |
| 752 | | | |
| SEQ ID NO: | VIAVVNK | ENSG00000130396.16 | 8 |
| 753 | | | |
| SEQ ID NO: | VSHSELR | ENSG00000146733.9 | 8 |
| 754 | | | |
| SEQ ID NO: | WSDGVGFSYHNFDR | ENSG00000011028.9 | 8 |
| 755 | | | |
| SEQ ID NO: | YGADDIELLPEAQHK | ENSG00000100714.11 | 8 |
| 756 | | | |
| SEQ ID NO: | AKPEASFQVWNK | ENSG00000073849.10 | 7 |
| 757 | | | |
| SEQ ID NO: | ALQLSNSPGASSAFLK | ENSG00000170776.15 | 7 |
| 758 | | | |
| SEQ ID NO: | ASSEGGTAAGAGLDSLHKNSVS | ENSG00000130429.8 | 7 |
| 759 | QISVLSGGK | | |
| SEQ ID NO: | AVEMAAQR | ENSG00000184207.8 | 7 |
| 760 | | | |
| SEQ ID NO: | AVLELLQR | ENSG00000105963.9 | 7 |
| 761 | | | |
| SEQ ID NO: | AYAQQLADWAR | ENSG00000165912.11 | 7 |
| 762 | | | |
| SEQ ID NO: | DHSAIPVINR | ENSG00000166825.9 | 7 |
| 763 | | | |
| SEQ ID NO: | DLRDPAVCR | ENSG00000172037.9 | 7 |
| 764 | | | |
| SEQ ID NO: | FGSCVPHTTRPR | ENSG00000082458.7 | 7 |
| 765 | | | |
| SEQ ID NO: | GPQYGTLEK | ENSG00000165912.11 | 7 |
| 766 | | | |
| SEQ ID NO: | HWDDVVCESR | ENSG00000172037.9 | 7 |
| 767 | | | |
| SEQ ID NO: | IVLYQTDASLTPWTVR | ENSG00000032444.11 | 7 |
| 768 | | | |
| SEQ ID NO: | KVHSPQQVDFR | ENSG00000065534.14 | 7 |
| 769 | | | |
| SEQ ID NO: | LCTDHGSQLVTITNR | ENSG00000011028.9 | 7 |
| 770 | | | |
| SEQ ID NO: | LDFLPDMMVEGR | ENSG00000048740.13 | 7 |
| 771 | | | |
| SEQ ID NO: | LEAVAEEKPHVKPYFSK | ENSG00000065534.14 | 7 |
| 772 | | | |
| SEQ ID NO: | LEVDAIVNAANSSLLGGGGVDG | ENSG00000133315.6 | 7 |
| 773 | CIHR | | |
| SEQ ID NO: | LLHEMQIQHPTASLIAK | ENSG00000146731.6 | 7 |
| 774 | | | |
| SEQ ID NO: | LLVEELPLR | ENSG00000198947.10 | 7 |
| 775 | | | |
| SEQ ID NO: | LMNSQLVTTEK | ENSG00000073849.10 | 7 |
| 776 | | | |
| SEQ ID NO: | LSNPPSAGPIVVHCSAGAGR | ENSG00000152894.10 | 7 |
| 777 | | | |
| SEQ ID NO: | LSPSSTETTTLPGSPTTPSLSEK | ENSG00000205277.5 | 7 |
| 778 | | | |
| SEQ ID NO: | LSPSSTETTTLPGSPTTPSLSEK | ENSG00000205277.5 | 7 |
| 779 | | | |
| SEQ ID NO: | LSPSSTETTTLPGSPTTPSLSEK | ENSG00000205277.5 | 7 |
| 780 | | | |
| SEQ ID NO: | LSPSSTETTTLPGSPTTPSLSEK | ENSG00000205277.5 | 7 |
| 781 | | | |
| SEQ ID NO: | MYLFYGNK | ENSG00000196961.8 | 7 |
| 782 | | | |
| SEQ ID NO: | PPLLLILDR | ENSG00000136631.8 | 7 |
| 783 | | | |
| SEQ ID NO: | PSLSLGTITDEEMK | ENSG00000137497.13 | 7 |
| 784 | | | |
| SEQ ID NO: | QCHECIEHIR | ENSG00000106066.9 | 7 |
| 785 | | | |
| SEQ ID NO: | QQNQELQEQLR | ENSG00000137497.13 | 7 |
| 786 | | | |
| SEQ ID NO: | SFAPILPHLAEEVFQHIPY | ENSG00000067704.8 | 7 |
| 787 | | | |
| SEQ ID NO: | SGLCPHVVVLVATVR | ENSG00000100714.11 | 7 |
| 788 | | | |
| SEQ ID NO: | SITILSTPEGTSAACK | ENSG00000136231.9 | 7 |
| 789 | | | |
| SEQ ID NO: | SLEGSDDAVLLQR | ENSG00000198947.10 | 7 |
| 790 | | | |
| SEQ ID NO: | SMDAETYVEGQR | ENSG00000130396.16 | 7 |
| 791 | | | |
| SEQ ID NO: | STTSGLVGESTPSR | ENSG00000205277.5 | 7 |
| 792 | | | |
| SEQ ID NO: | STTSGLVGESTPSR | ENSG00000205277.5 | 7 |
| 793 | | | |
| SEQ ID NO: | STTSGLVGESTPSR | ENSG00000205277.5 | 7 |
| 794 | | | |
| SEQ ID NO: | STTSGLVGESTPSR | ENSG00000205277.5 | 7 |
| 795 | | | |
| SEQ ID NO: | TQGSSTSWFGSNQSKPEFTVDLK | ENSG00000165322.13 | 7 |
| 796 | | | |
| SEQ ID NO: | VIMIVTDGRPQDSVAEVAAK | ENSG00000132561.9 | 7 |
| 797 | | | |
| SEQ ID NO: | VPPPKPATPDFR | ENSG00000065534.14 | 7 |
| 798 | | | |
| SEQ ID NO: | WGFCPIK | ENSG00000011028.9 | 7 |
| 799 | | | |
| SEQ ID NO: | YAVQVAEGMGYLESKR | ENSG00000061938.12 | 7 |
| 800 | | | |
| SEQ ID NO: | AAEEIGIKATHIKLPR | ENSG00000100714.11 | 6 |
| 801 | | | |
| SEQ ID NO: | AGDAVNVVVTGGK | ENSG00000132205.6 | 6 |
| 802 | | | |
| SEQ ID NO: | AGDTLSGTCLLIANK | ENSG00000142453.7 | 6 |
| 803 | | | |
| SEQ ID NO: | AGDTLSGTCLLIANKR | ENSG00000142453.7 | 6 |
| 804 | | | |
| SEQ ID NO: | AIDYEIQR | ENSG00000059691.7 | 6 |
| 805 | | | |
| SEQ ID NO: | ALEQALEK | ENSG00000166825.9 | 6 |
| 806 | | | |
| SEQ ID NO: | ALSSAGER | ENSG00000172037.9 | 6 |
| 807 | | | |
| SEQ ID NO: | CFLCDSR | ENSG00000172037.9 | 6 |
| 808 | | | |
| SEQ ID NO: | DAEEWVQQLK | ENSG00000005020.8 | 6 |
| 809 | | | |
| SEQ ID NO: | DDEFTHLYTLIVRPDNTYEVK | ENSG00000179218.9 | 6 |
| 810 | | | |
| SEQ ID NO: | DFGSFDKFKEK | ENSG00000112096.12 | 6 |
| 811 | | | |
| SEQ ID NO: | DGDVQAGANLSFNR | ENSG00000158560.10 | 6 |
| 812 | | | |
| SEQ ID NO: | EFASHLQQLQDALNELTEEHSK | ENSG00000137497.13 | 6 |
| 813 | | | |
| SEQ ID NO: | ETLPELPSVTR | ENSG00000059691.7 | 6 |
| 814 | | | |
| SEQ ID NO: | GAPMHDLLLWNNATVTTCHSK | ENSG00000100714.11 | 6 |
| 815 | | | |
| SEQ ID NO: | HKSDFGK | ENSG00000179218.9 | 6 |
| 816 | | | |
| SEQ ID NO: | IALETSLSK | ENSG00000076662.5 | 6 |
| 817 | | | |
| SEQ ID NO: | IGDFGLMR | ENSG00000061938.12 | 6 |
| 818 | | | |
| SEQ ID NO: | ILREEGPK | ENSG00000004864.9 | 6 |
| 819 | | | |
| SEQ ID NO: | KSEAPFTHK | ENSG00000162614.14 | 6 |
| 820 | | | |
| SEQ ID NO: | LCGDLVSCFQER | ENSG00000165912.11 | 6 |
| 821 | | | |
| SEQ ID NO: | LLDLLEGLTGQK | ENSG00000198947.10 | 6 |
| 822 | | | |
| SEQ ID NO: | LLEQSIQSAQETEK | ENSG00000198947.10 | 6 |
| 823 | | | |
| SEQ ID NO: | LQAEDCSIACLPR | ENSG00000152894.10 | 6 |
| 824 | | | |
| SEQ ID NO: | MNVVFAVK | ENSG00000136631.8 | 6 |
| 825 | | | |
| SEQ ID NO: | NPPAAYIQK | ENSG00000184922.9 | 6 |
| 826 | | | |
| SEQ ID NO: | NTSLNPQELQR | ENSG00000125826.15 | 6 |
| 827 | | | |
| SEQ ID NO: | NVLINKDIR | ENSG00000179218.9 | 6 |
| 828 | | | |
| SEQ ID NO: | PAETLKPMGN | ENSG00000065534.14 | 6 |
| 829 | | | |
| SEQ ID NO: | PAETLKPMGN | ENSG00000065534.14 | 6 |
| 830 | | | |
| SEQ ID NO: | PFSLDALSK | ENSG00000146731.6 | 6 |
| 831 | | | |
| SEQ ID NO: | PLLPANHVTMAK | ENSG00000067704.8 | 6 |
| 832 | | | |
| SEQ ID NO: | PSGYTCACDSGFR | ENSG00000090006.13 | 6 |
| 833 | | | |
| SEQ ID NO: | PSVVLSAAHTVAAR | ENSG00000032444.11 | 6 |
| 834 | | | |
| SEQ ID NO: | QASNGVLIR | ENSG00000166825.9 | 6 |
| 835 | | | |
| SEQ ID NO: | QGLELAADCHLSR | ENSG00000130396.16 | 6 |
| 836 | | | |
| SEQ ID NO: | QVEELLMAMEK | ENSG00000082805.15 | 6 |
| 837 | | | |
| SEQ ID NO: | QVEKEETNEIQVVNEEPQR | ENSG00000135052.12 | 6 |
| 838 | | | |
| SEQ ID NO: | RLEAEFPPHHSQSTFR | ENSG00000061938.12 | 6 |
| 839 | | | |
| SEQ ID NO: | SWDTNLIECNLDQELK | ENSG00000131711.10 | 6 |
| 840 | | | |
| SEQ ID NO: | TGEPCVAELTEENFQR | ENSG00000082805.15 | 6 |
| 841 | | | |
| SEQ ID NO: | VECEPSWQPFQGHCYR | ENSG00000011028.9 | 6 |
| 842 | | | |
| SEQ ID NO: | VRFTPVVCGLR | ENSG00000090006.13 | 6 |
| 843 | | | |
| SEQ ID NO: | VSLSQPR | ENSG00000090006.13 | 6 |
| 844 | | | |
| SEQ ID NO: | AAEGYTQFYYVDVLDGK | ENSG00000205277.5 | 5 |
| 845 | | | |
| SEQ ID NO: | AALEEVEGDVAELELK | ENSG00000114331.8 | 5 |
| 846 | | | |
| SEQ ID NO: | AEEFGNETWGVTK | ENSG00000179218.9 | 5 |
| 847 | | | |
| SEQ ID NO: | AFEDWLNDDLGSYQGAQGNR | ENSG00000101199.8 | 5 |
| 848 | | | |
| SEQ ID NO: | ATQEWLEK | ENSG00000137497.13 | 5 |
| 849 | | | |
| SEQ ID NO: | CSQFCTTGMDGGMSIWDVK | ENSG00000130429.8 | 5 |
| 850 | | | |
| SEQ ID NO: | DQLVIPDGQEEEQEAAGEGR | ENSG00000135052.12 | 5 |
| 851 | | | |
| SEQ ID NO: | EAQEAEAFALYHK | ENSG00000099991.12 | 5 |
| 852 | | | |
| SEQ ID NO: | EGNCSGCIQDCNR | ENSG00000104450.8 | 5 |
| 853 | | | |
| SEQ ID NO: | EGQIQSVVTYDLALDSGRPHSR | ENSG00000169896.12 | 5 |
| 854 | | | |
| SEQ ID NO: | EIDAALQKK | ENSG00000162614.14 | 5 |
| 855 | | | |
| SEQ ID NO: | ERFQNLDKK | ENSG00000130429.8 | 5 |
| 856 | | | |
| SEQ ID NO: | ETQPPDLPTTALGGCPSDWIQFL | ENSG00000011028.9 | 5 |
| 857 | NK | | |
| SEQ ID NO: | FREFLESQEDYDPCWSLQEK | ENSG00000101199.8 | 5 |
| 858 | | | |
| SEQ ID NO: | GGTAAGAGLDSLHK | ENSG00000130429.8 | 5 |
| 859 | | | |
| SEQ ID NO: | GLNPGTLNILVR | ENSG00000152894.10 | 5 |
| 860 | | | |
| SEQ ID NO: | GQLAPVFQR | ENSG00000213380.9 | 5 |
| 861 | | | |
| SEQ ID NO: | GSAASTCILTIESK | ENSG00000162614.14 | 5 |
| 862 | | | |
| SEQ ID NO: | ICGVEDAVSEMTR | ENSG00000146733.9 | 5 |
| 863 | | | |
| SEQ ID NO: | IITEGFEAAKEK | ENSG00000146731.6 | 5 |
| 864 | | | |
| SEQ ID NO: | ILKDIANR | ENSG00000067704.8 | 5 |
| 865 | | | |
| SEQ ID NO: | IQDLEHHLGLALNEVQAAK | ENSG00000011454.12 | 5 |
| 866 | | | |
| SEQ ID NO: | IVDAVIEQVK | ENSG00000170776.15 | 5 |
| 867 | | | |
| SEQ ID NO: | KVNVLQK | ENSG00000082805.15 | 5 |
| 868 | | | |
| SEQ ID NO: | LLLQCQVSSDPPATIIWTLNGK | ENSG00000065534.14 | 5 |
| 869 | | | |
| SEQ ID NO: | LSFEEMER | ENSG00000162614.14 | 5 |
| 870 | | | |
| SEQ ID NO: | LSPIPAVPASVPLQAWHPAK | ENSG00000104450.8 | 5 |
| 871 | | | |
| SEQ ID NO: | NQDNEDEWPLAEILSVK | ENSG00000172977.8 | 5 |
| 872 | | | |
| SEQ ID NO: | PTTLTDEEINR | ENSG00000100714.11 | 5 |
| 873 | | | |
| SEQ ID NO: | QIIEDQSGHYIWVPSPEKL | ENSG00000082458.7 | 5 |
| 874 | | | |
| SEQ ID NO: | QIQESEHMK | ENSG00000065534.14 | 5 |
| 875 | | | |
| SEQ ID NO: | RDFGSFDK | ENSG00000112096.12 | 5 |
| 876 | | | |
| SEQ ID NO: | RPQLEELITAAQNLK | ENSG00000198947.10 | 5 |
| 877 | | | |
| SEQ ID NO: | RPYWCISR | ENSG00000067704.8 | 5 |
| 878 | | | |
| SEQ ID NO: | SEESTASHSSQDATGTIVLPAR | ENSG00000205277.5 | 5 |
| 879 | | | |
| SEQ ID NO: | SEESTASHSSQDATGTIVLPAR | ENSG00000205277.5 | 5 |
| 880 | | | |
| SEQ ID NO: | SEESTASHSSQDATGTIVLPAR | ENSG00000205277.5 | 5 |
| 881 | | | |
| SEQ ID NO: | SEESTASHSSQDATGTIVLPAR | ENSG00000205277.5 | 5 |
| 882 | | | |
| SEQ ID NO: | SGTIFDNFLITNDEAY | ENSG00000179218.9 | 5 |
| 883 | | | |
| SEQ ID NO: | SQDADSPGSSGAPENLTFK | ENSG00000130396.16 | 5 |
| 884 | | | |
| SEQ ID NO: | TCYPLESRPSLSLGTITDEEMK | ENSG00000137497.13 | 5 |
| 885 | | | |
| SEQ ID NO: | TGLFTPDMAFETIVK | ENSG00000106976.14 | 5 |
| 886 | | | |
| SEQ ID NO: | VATEAEFSPEDSPSVR | ENSG00000155629.10 | 5 |
| 887 | | | |
| SEQ ID NO: | VPPPCDLGR | ENSG00000090006.13 | 5 |
| 888 | | | |
| SEQ ID NO: | VVSNFILQALQGEPLTVYGSGSQ | ENSG00000115652.10 | 5 |
| 889 | TR | | |
| SEQ ID NO: | AAIVFTDGR | ENSG00000132561.9 | 4 |
| 890 | | | |
| SEQ ID NO: | AGKGEVTFEDVK | ENSG00000004864.9 | 4 |
| 891 | | | |
| SEQ ID NO: | AIDLEIK | ENSG00000162614.14 | 4 |
| 892 | | | |
| SEQ ID NO: | AIEEELQEIASEPTNK | ENSG00000132561.9 | 4 |
| 893 | | | |
| SEQ ID NO: | ASFITPVPGGVGPMTVAMLMQ | ENSG00000100714.11 | 4 |
| 894 | STVESAKR | | |
| SEQ ID NO: | CAVVSSAGSLK | ENSG00000073849.10 | 4 |
| 895 | | | |
| SEQ ID NO: | CHYYANK | ENSG00000134871.13 | 4 |
| 896 | | | |
| SEQ ID NO: | CLTALPYICK | ENSG00000011028.9 | 4 |
| 897 | | | |
| SEQ ID NO: | DEELPTLLHFAAK | ENSG00000155629.10 | 4 |
| 898 | | | |
| SEQ ID NO: | DKVMPLIIQGFK | ENSG00000086475.10 | 4 |
| 899 | | | |
| SEQ ID NO: | DKVVALAEGR | ENSG00000101199.8 | 4 |
| 900 | | | |
| SEQ ID NO: | DQVFGSNLANLCQR | ENSG00000165322.13 | 4 |
| 901 | | | |
| SEQ ID NO: | DVFNVEDQKR | ENSG00000135052.12 | 4 |
| 902 | | | |
| SEQ ID NO: | EAELEYNPEHVSR | ENSG00000067704.8 | 4 |
| 903 | | | |
| SEQ ID NO: | EATDVIIIHSK | ENSG00000166825.9 | 4 |
| 904 | | | |
| SEQ ID NO: | EQYDVPQEWR | ENSG00000205277.5 | 4 |
| 905 | | | |
| SEQ ID NO: | ESPQDSAITR | ENSG00000011454.12 | 4 |
| 906 | | | |
| SEQ ID NO: | EVVLQWFTENSK | ENSG00000166825.9 | 4 |
| 907 | | | |
| SEQ ID NO: | EYFTFPASK | ENSG00000130396.16 | 4 |
| 908 | | | |
| SEQ ID NO: | FFDSACTMGAYHPLLYEK | ENSG00000073849.10 | 4 |
| 909 | | | |
| SEQ ID NO: | FGSFDKFK | ENSG00000112096.12 | 4 |
| 910 | | | |
| SEQ ID NO: | FIEAGQFNDNLYGTSIQSVR | ENSG00000082458.7 | 4 |
| 911 | | | |
| SEQ ID NO: | FIPGSALNGMVEMMDR | ENSG00000067704.8 | 4 |
| 912 | | | |
| SEQ ID NO: | GHLQIAACPNQD | ENSG00000112096.12 | 4 |
| 913 | | | |
| SEQ ID NO: | GSWQPVGDLLIDSLQDHLEK | ENSG00000198947.10 | 4 |
| 914 | | | |
| SEQ ID NO: | HVVPGVER | ENSG00000130589.12 | 4 |
| 915 | | | |
| SEQ ID NO: | IDYGTGHEAAFAAFLCCLCK | ENSG00000119383.15 | 4 |
| 916 | | | |
| SEQ ID NO: | IVGNGSEQQLQK | ENSG00000011454.12 | 4 |
| 917 | | | |
| SEQ ID NO: | KESEETIIQTDEDVPGPVPVK | ENSG00000152894.10 | 4 |
| 918 | | | |
| SEQ ID NO: | LEPAGPACPEGGR | ENSG00000213380.9 | 4 |
| 919 | | | |
| SEQ ID NO: | LETLTNQFSDSK | ENSG00000082805.15 | 4 |
| 920 | | | |
| SEQ ID NO: | LFSGSQVR | ENSG00000059691.7 | 4 |
| 921 | | | |
| SEQ ID NO: | LLEILK | ENSG00000082805.15 | 4 |
| 922 | | | |
| SEQ ID NO: | LLQQFPLDLEK | ENSG00000198947.10 | 4 |
| 923 | | | |
| SEQ ID NO: | LLTESVNSVIAQAPPVAQEALKK | ENSG00000198947.10 | 4 |
| 924 | | | |
| SEQ ID NO: | LPVEDKIR | ENSG00000100714.11 | 4 |
| 925 | | | |
| SEQ ID NO: | LPYGGQCR | ENSG00000172037.9 | 4 |
| 926 | | | |
| SEQ ID NO: | LSTAITLLPLEEGR | ENSG00000019144.12 | 4 |
| 927 | | | |
| SEQ ID NO: | LTASSTCGLNGPQPYCIVSHLQD | ENSG00000172037.9 | 4 |
| 928 | EKK | | |
| SEQ ID NO: | LVTPHGESEQIGVIPSK | ENSG00000082458.7 | 4 |
| 929 | | | |
| SEQ ID NO: | NAEVRPPFTYASLIR | ENSG00000114861.14 | 4 |
| 930 | | | |
| SEQ ID NO: | PAETLKPMGNAKPDENLK | ENSG00000065534.14 | 4 |
| 931 | | | |
| SEQ ID NO: | PGGAGPCATVSVFPGAR | ENSG00000142453.7 | 4 |
| 932 | | | |
| SEQ ID NO: | QELNTIASKPPR | ENSG00000169896.12 | 4 |
| 933 | | | |
| SEQ ID NO: | RFSTEYELQQLEQFKK | ENSG00000166825.9 | 4 |
| 934 | | | |
| SEQ ID NO: | RVPPPCAPGR | ENSG00000090006.13 | 4 |
| 935 | | | |
| SEQ ID NO: | SCHAGFGSPAGWDVPVGALIQR | ENSG00000163975.7 | 4 |
| 936 | | | |
| SEQ ID NO: | SFGHFPGPEFLDVEK | ENSG00000165322.13 | 4 |
| 937 | | | |
| SEQ ID NO: | SITEVGEALK | ENSG00000198947.10 | 4 |
| 938 | | | |
| SEQ ID NO: | SLQADTTNTDTALTTLEEALAEKE | ENSG00000082805.15 | 4 |
| 939 | R | | |
| SEQ ID NO: | SSNLLDLKNPFFR | ENSG00000142453.7 | 4 |
| 940 | | | |
| SEQ ID NO: | TGYAFVDCPDESWALK | ENSG00000136231.9 | 4 |
| 941 | | | |
| SEQ ID NO: | TQVTFFFPLDLSYR | ENSG00000169896.12 | 4 |
| 942 | | | |
| SEQ ID NO: | TSKDDLLLTDFEGALK | ENSG00000011454.12 | 4 |
| 943 | | | |
| SEQ ID NO: | TVTINTEQK | ENSG00000065534.14 | 4 |
| 944 | | | |
| SEQ ID NO: | VADLLQHINLMK | ENSG00000152894.10 | 4 |
| 945 | | | |
| SEQ ID NO: | VDANISVHHPGEPLGVR | ENSG00000059691.7 | 4 |
| 946 | | | |
| SEQ ID NO: | VMVGDLEDINEMIIK | ENSG00000198947.10 | 4 |
| 947 | | | |
| SEQ ID NO: | VVGDVAYDEAKER | ENSG00000100714.11 | 4 |
| 948 | | | |
| SEQ ID NO: | VYLLYR | ENSG00000167770.7 | 4 |
| 949 | | | |
| SEQ ID NO: | WANGLSEEKPLSVPR | ENSG00000064545.10 | 4 |
| 950 | | | |
| SEQ ID NO: | WAPNENK | ENSG00000130429.8 | 4 |
| 951 | | | |
| SEQ ID NO: | WCVLSTPEIQK | ENSG00000163975.7 | 4 |
| 952 | | | |
| SEQ ID NO: | WMDPEGEMKPGR | ENSG00000113387.7 | 4 |
| 953 | | | |
| SEQ ID NO: | WVLLQDILLK | ENSG00000198947.10 | 4 |
| 954 | | | |
| SEQ ID NO: | YEEQRPSLK | ENSG00000162614.14 | 4 |
| 955 | | | |
| SEQ ID NO: | YGLLNVTK | ENSG00000165322.13 | 4 |
| 956 | | | |
| SEQ ID NO: | YQHIGLVAMFR | ENSG00000169896.12 | 4 |
| 957 | | | |
| SEQ ID NO: | YVPAIAHLIHSLNPVR | ENSG00000106066.9 | 4 |
| 958 | | | |
| SEQ ID NO: | AAILQTEVDALR | ENSG00000082805.15 | 3 |
| 959 | | | |
| SEQ ID NO: | ADGGPEAGELPSIGEATAALALA | ENSG00000019144.12 | 3 |
| 960 | GR | | |
| SEQ ID NO: | AENYWWR | ENSG00000061938.12 | 3 |
| 961 | | | |
| SEQ ID NO: | AEQPPHLTPGIR | ENSG00000146733.9 | 3 |
| 962 | | | |
| SEQ ID NO: | AIEALSGK | ENSG00000136231.9 | 3 |
| 963 | | | |
| SEQ ID NO: | AIGNIELGIR | ENSG00000131711.10 | 3 |
| 964 | | | |
| SEQ ID NO: | AMNNSWHPECFR | ENSG00000169756.12 | 3 |
| 965 | | | |
| SEQ ID NO: | APNLSSGNVSLK | ENSG00000155629.10 | 3 |
| 966 | | | |
| SEQ ID NO: | AQVAHADQQLR | ENSG00000137497.13 | 3 |
| 967 | | | |
| SEQ ID NO: | AREHFGTVK | ENSG00000211460.7 | 3 |
| 968 | | | |
| SEQ ID NO: | ARFEQMAKAREE | ENSG00000162614.14 | 3 |
| 969 | | | |
| SEQ ID NO: | ASFANEDGQVSPGSLLLAGAIAG | ENSG00000004864.9 | 3 |
| 970 | MPAASLVTPADVIK | | |
| SEQ ID NO: | AVVVGFDPHFSYMK | ENSG00000184207.8 | 3 |
| 971 | | | |
| SEQ ID NO: | DDLLLTDFEGALK | ENSG00000011454.12 | 3 |
| 972 | | | |
| SEQ ID NO: | DNEETGFGSGTR | ENSG00000166825.9 | 3 |
| 973 | | | |
| SEQ ID NO: | DVDGLTSINAGK | ENSG00000100714.11 | 3 |
| 974 | | | |
| SEQ ID NO: | EAGIQPSLLCVR | ENSG00000163975.7 | 3 |
| 975 | | | |
| SEQ ID NO: | EDFNSKHMANQRALGK | ENSG00000172037.9 | 3 |
| 976 | | | |
| SEQ ID NO: | EEGDLGPVYGFQWR | ENSG00000176890.11 | 3 |
| 977 | | | |
| SEQ ID NO: | EELSSGDSLSPDPWK | ENSG00000130396.16 | 3 |
| 978 | | | |
| SEQ ID NO: | ELQKAVEEMK | ENSG00000198947.10 | 3 |
| 979 | | | |
| SEQ ID NO: | ENSMLREEMHRRFENAPDSAKT | ENSG00000082805.15 | 3 |
| 980 | K | | |
| SEQ ID NO: | EQISDIDDAVRK | ENSG00000113387.7 | 3 |
| 981 | | | |
| SEQ ID NO: | EVVDAGLVGLER | ENSG00000138162.13 | 3 |
| 982 | | | |
| SEQ ID NO: | FEALQAPACHENMVK | ENSG00000196961.8 | 3 |
| 983 | | | |
| SEQ ID NO: | FHLCSVATR | ENSG00000196961.8 | 3 |
| 984 | | | |
| SEQ ID NO: | FNLDTENAMTFQENAR | ENSG00000169896.12 | 3 |
| 985 | | | |
| SEQ ID NO: | FTEEIPLK | ENSG00000136231.9 | 3 |
| 986 | | | |
| SEQ ID NO: | GALTSTPYSPTQHLER | ENSG00000153310.14 | 3 |
| 987 | | | |
| SEQ ID NO: | GDEGPIGHQGPIGQEGAPGR | ENSG00000134871.13 | 3 |
| 988 | | | |
| SEQ ID NO: | GDSGQPLFLTPYIEAGK | ENSG00000106066.9 | 3 |
| 989 | | | |
| SEQ ID NO: | GEPVSAEDLGVSGALTVLMK | ENSG00000100714.11 | 3 |
| 990 | | | |
| SEQ ID NO: | GFSGIFPACHPCHACFGDWDR | ENSG00000172037.9 | 3 |
| 991 | | | |
| SEQ ID NO: | GIDTPQCHR | ENSG00000172037.9 | 3 |
| 992 | | | |
| SEQ ID NO: | GWDSSHEDDLPVYLAR | ENSG00000113657.8 | 3 |
| 993 | | | |
| SEQ ID NO: | HEQNIDCGGGYV | ENSG00000179218.9 | 3 |
| 994 | | | |
| SEQ ID NO: | HLNQGTDEDIYLLGK | ENSG00000073849.10 | 3 |
| 995 | | | |
| SEQ ID NO: | IAELQQR | ENSG00000137497.13 | 3 |
| 996 | | | |
| SEQ ID NO: | ILVVITDGEK | ENSG00000169896.12 | 3 |
| 997 | | | |
| SEQ ID NO: | INDAFNLASAHK | ENSG00000166825.9 | 3 |
| 998 | | | |
| SEQ ID NO: | INLPAPNPDHVGGYK | ENSG00000004864.9 | 3 |
| 999 | | | |
| SEQ ID NO: | IQEILTQVK | ENSG00000136231.9 | 3 |
| 1000 | | | |
| SEQ ID NO: | IQPTTPSEPTAIK | ENSG00000198947.10 | 3 |
| 1001 | | | |
| SEQ ID NO: | ISPGSTEITTLPGSTTTPGLSEAST | ENSG00000205277.5 | 3 |
| 1002 | TFYSSPR | | |
| SEQ ID NO: | ISPGSTEITTLPGSTTTPGLSEAST | ENSG00000205277.5 | 3 |
| 1003 | TFYSSPR | | |
| SEQ ID NO: | ISPGSTEITTLPGSTTTPGLSEAST | ENSG00000205277.5 | 3 |
| 1004 | TFYSSPR | | |
| SEQ ID NO: | ISPGSTEITTLPGSTTTPGLSEAST | ENSG00000205277.5 | 3 |
| 1005 | TFYSSPR | | |
| SEQ ID NO: | ISSMERGLR | ENSG00000082805.15 | 3 |
| 1006 | | | |
| SEQ ID NO: | IVLDVGCGSGILSFFAAQAGAR | ENSG00000142453.7 | 3 |
| 1007 | | | |
| SEQ ID NO: | IYGADDIELLPEAQHKAEVYTK | ENSG00000100714.11 | 3 |
| 1008 | | | |
| SEQ ID NO: | KDVKLDK | ENSG00000170776.15 | 3 |
| 1009 | | | |
| SEQ ID NO: | KFQETEQTIQK | ENSG00000132205.6 | 3 |
| 1010 | | | |
| SEQ ID NO: | KFSYDLSQCINQMK | ENSG00000135052.12 | 3 |
| 1011 | | | |
| SEQ ID NO: | KLPAENGSSSAETLNAK | ENSG00000065534.14 | 3 |
| 1012 | | | |
| SEQ ID NO: | KLTELENELNTK | ENSG00000130396.16 | 3 |
| 1013 | | | |
| SEQ ID NO: | KQTENPK | ENSG00000198947.10 | 3 |
| 1014 | | | |
| SEQ ID NO: | KQVTPLFIHFR | ENSG00000166825.9 | 3 |
| 1015 | | | |
| SEQ ID NO: | KRVEDAYILTCNVSLEYEK | ENSG00000146731.6 | 3 |
| 1016 | | | |
| SEQ ID NO: | KVPFAWCAPESLK | ENSG00000061938.12 | 3 |
| 1017 | | | |
| SEQ ID NO: | LAGAPAPK | ENSG00000184207.8 | 3 |
| 1018 | | | |
| SEQ ID NO: | LHELYEKVFSRRADR | ENSG00000032444.11 | 3 |
| 1019 | | | |
| SEQ ID NO: | LLDPEDVDTTYPDKK | ENSG00000198947.10 | 3 |
| 1020 | | | |
| SEQ ID NO: | LLESLQENHFQEDEQFLGAVMP | ENSG00000086475.10 | 3 |
| 1021 | R | | |
| SEQ ID NO: | LLQVAVEDR | ENSG00000198947.10 | 3 |
| 1022 | | | |
| SEQ ID NO: | LLVSDIQTIQPSLNSVNEGGQK | ENSG00000198947.10 | 3 |
| 1023 | | | |
| SEQ ID NO: | LNLHSADWQR | ENSG00000198947.10 | 3 |
| 1024 | | | |
| SEQ ID NO: | LPAENGSSSAETLNAK | ENSG00000065534.14 | 3 |
| 1025 | | | |
| SEQ ID NO: | LPLEDADIIK | ENSG00000110237.3 | 3 |
| 1026 | | | |
| SEQ ID NO: | LPLQMALTELETLAEK | ENSG00000104728.11 | 3 |
| 1027 | | | |
| SEQ ID NO: | LPTEWNVLGTDQSLHDAGPR | ENSG00000170776.15 | 3 |
| 1028 | | | |
| SEQ ID NO: | LQEALSQLDFQWEK | ENSG00000198947.10 | 3 |
| 1029 | | | |
| SEQ ID NO: | LQEPSAQANCCDSEKNGDIGQQ | ENSG00000132205.6 | 3 |
| 1030 | IK | | |
| SEQ ID NO: | LQSQVISELDACKECTQGVQR | ENSG00000132205.6 | 3 |
| 1031 | | | |
| SEQ ID NO: | LYIGNLSENAAPSDLESIFK | ENSG00000136231.9 | 3 |
| 1032 | | | |
| SEQ ID NO: | MLESYLHAK | ENSG00000142453.7 | 3 |
| 1033 | | | |
| SEQ ID NO: | NLLLATR | ENSG00000061938.12 | 3 |
| 1034 | | | |
| SEQ ID NO: | NVLLHEMQIQHPTASLIAK | ENSG00000146731.6 | 3 |
| 1035 | | | |
| SEQ ID NO: | QKPCDLPLR | ENSG00000136231.9 | 3 |
| 1036 | | | |
| SEQ ID NO: | QPAAFIVTQYPLPNTVK | ENSG00000152894.10 | 3 |
| 1037 | | | |
| SEQ ID NO: | QQLGHIEAWAEK | ENSG00000130396.16 | 3 |
| 1038 | | | |
| SEQ ID NO: | QREEHYFCK | ENSG00000133315.6 | 3 |
| 1039 | | | |
| SEQ ID NO: | QVFHALEDELQK | ENSG00000151914.13 | 3 |
| 1040 | | | |
| SEQ ID NO: | QWMENPNNNPIHPNLR | ENSG00000166825.9 | 3 |
| 1041 | | | |
| SEQ ID NO: | SAQALVEQMVNEGVNADSIK | ENSG00000198947.10 | 3 |
| 1042 | | | |
| SEQ ID NO: | SATSVLVGEPTTSPISSGSTETTAL | ENSG00000205277.5 | 3 |
| 1043 | PGSTTTAGLSEK | | |
| SEQ ID NO: | SATSVLVGEPTTSPISSGSTETTAL | ENSG00000205277.5 | 3 |
| 1044 | PGSTTTAGLSEK | | |
| SEQ ID NO: | SATSVLVGEPTTSPISSGSTETTAL | ENSG00000205277.5 | 3 |
| 1045 | PGSTTTAGLSEK | | |
| SEQ ID NO: | SAVEGMPSNLDSEVAWGK | ENSG00000198947.10 | 3 |
| 1046 | | | |
| SEQ ID NO: | SEDSTIYDLLKDPVSLR | ENSG00000104728.11 | 3 |
| 1047 | | | |
| SEQ ID NO: | SLESALKDLK | ENSG00000130429.8 | 3 |
| 1048 | | | |
| SEQ ID NO: | SPNPALTFCVK | ENSG00000019144.12 | 3 |
| 1049 | | | |
| SEQ ID NO: | STTFYTSPR | ENSG00000205277.5 | 3 |
| 1050 | | | |
| SEQ ID NO: | STTFYTSPR | ENSG00000205277.5 | 3 |
| 1051 | | | |
| SEQ ID NO: | STTFYTSPR | ENSG00000205277.5 | 3 |
| 1052 | | | |
| SEQ ID NO: | STTFYTSPR | ENSG00000205277.5 | 3 |
| 1053 | | | |
| SEQ ID NO: | TCHYYANK | ENSG00000134871.13 | 3 |
| 1054 | | | |
| SEQ ID NO: | TCSECQELHWGDPGLQCHACDC | ENSG00000172037.9 | 3 |
| 1055 | DSR | | |
| SEQ ID NO: | TCYPLESR | ENSG00000137497.13 | 3 |
| 1056 | | | |
| SEQ ID NO: | TEFQLELPVK | ENSG00000169896.12 | 3 |
| 1057 | | | |
| SEQ ID NO: | TKEPVIMSTLETVR | ENSG00000198947.10 | 3 |
| 1058 | | | |
| SEQ ID NO: | TPLWIGLAGEEGSRR | ENSG00000011028.9 | 3 |
| 1059 | | | |
| SEQ ID NO: | TQSLNPAPFSPLTAQQMKPEKPS | ENSG00000130396.16 | 3 |
| 1060 | TLQRPQETVIR | | |
| SEQ ID NO: | TVGWNVPVGYLVESGR | ENSG00000163975.7 | 3 |
| 1061 | | | |
| SEQ ID NO: | VASSSSGNNFLSGSPASPMGDIL | ENSG00000137497.13 | 3 |
| 1062 | QTPQFQMR | | |
| SEQ ID NO: | VAWVSHDSTVCLADADK | ENSG00000130429.8 | 3 |
| 1063 | | | |
| SEQ ID NO: | VEQQPDYR | ENSG00000130396.16 | 3 |
| 1064 | | | |
| SEQ ID NO: | VIQEVSGLPSEGASEGNQYTPDA | ENSG00000169129.10 | 3 |
| 1065 | QR | | |
| SEQ ID NO: | VLDLLDPASGDLVIR | ENSG00000079616.8 | 3 |
| 1066 | | | |
| SEQ ID NO: | VLLHEMQIQHPTASLIAK | ENSG00000146731.6 | 3 |
| 1067 | | | |
| SEQ ID NO: | VMDKVTSDETR | ENSG00000138162.13 | 3 |
| 1068 | | | |
| SEQ ID NO: | VPRYELLLK | ENSG00000127084.13 | 3 |
| 1069 | | | |
| SEQ ID NO: | VQFGASHVFK | ENSG00000130396.16 | 3 |
| 1070 | | | |
| SEQ ID NO: | VSCIVSAAK | ENSG00000169129.10 | 3 |
| 1071 | | | |
| SEQ ID NO: | VTEILGIEPDREK | ENSG00000211460.7 | 3 |
| 1072 | | | |
| SEQ ID NO: | VVDALNQGLPR | ENSG00000079616.8 | 3 |
| 1073 | | | |
| SEQ ID NO: | WKTPAAIPATPVAVSQPIR | ENSG00000130396.16 | 3 |
| 1074 | | | |
| SEQ ID NO: | YLETADYAIREEIVLK | ENSG00000196961.8 | 3 |
| 1075 | | | |
| SEQ ID NO: | YLNWESDQPDNPSEENCGVIR | ENSG00000011028.9 | 3 |
| 1076 | | | |
| SEQ ID NO: | YVGFGNTPPPQKK | ENSG00000101199.8 | 3 |
| 1077 | | | |
| SEQ ID NO: | AAGNFATK | ENSG00000130396.16 | 2 |
| 1078 | | | |
| SEQ ID NO: | AEGERQPPPDSSEEAPPATQNFII | ENSG00000119383.15 | 2 |
| 1079 | PK | | |
| SEQ ID NO: | AGLVVEDALFETLPSDVR | ENSG00000171488.10 | 2 |
| 1080 | | | |
| SEQ ID NO: | AHCGDPVSLAAAGDGSPDIGPT | ENSG00000127084.13 | 2 |
| 1081 | GELSGSLK | | |
| SEQ ID NO: | AILQNHTDFKDK | ENSG00000142453.7 | 2 |
| 1082 | | | |
| SEQ ID NO: | AINVYGTSEPSQESELTTVGEKPE | ENSG00000065534.14 | 2 |
| 1083 | EPK | | |
| SEQ ID NO: | ALGEDQVAETSAMSDVLKDILK | ENSG00000157617.12 | 2 |
| 1084 | | | |
| SEQ ID NO: | ANIVMVLEIVSGGELFER | ENSG00000065534.14 | 2 |
| 1085 | | | |
| SEQ ID NO: | APEEQGLLPNGEPSQHSSAPQK | ENSG00000169129.10 | 2 |
| 1086 | | | |
| SEQ ID NO: | APGLGVLSPSGEER | ENSG00000065534.14 | 2 |
| 1087 | | | |
| SEQ ID NO: | AQDDVSEWASK | ENSG00000132561.9 | 2 |
| 1088 | | | |
| SEQ ID NO: | ASSISEEVAVGSIAATLK | ENSG00000170776.15 | 2 |
| 1089 | | | |
| SEQ ID NO: | ATLALDSVLTEEGK | ENSG00000170776.15 | 2 |
| 1090 | | | |
| SEQ ID NO: | AVGGDRQEAIQPGCIGGPKGLP | ENSG00000134871.13 | 2 |
| 1091 | GLPGPPGPTGAKGLRGIPGFAGA | | |
| | DGGP | | |
| SEQ ID NO: | AVGLVSTWTQR | ENSG00000127084.13 | 2 |
| 1092 | | | |
| SEQ ID NO: | AVSSADPR | ENSG00000138162.13 | 2 |
| 1093 | | | |
| SEQ ID NO: | AWHAFFTAAER | ENSG00000165912.11 | 2 |
| 1094 | | | |
| SEQ ID NO: | DCTQCLQHPWLMK | ENSG00000065534.14 | 2 |
| 1095 | | | |
| SEQ ID NO: | DEISDDAKDFISNLLK | ENSG00000065534.14 | 2 |
| 1096 | | | |
| SEQ ID NO: | DFGPASQHFLSTSVQGPWER | ENSG00000198947.10 | 2 |
| 1097 | | | |
| SEQ ID NO: | DFLDSLGFSTR | ENSG00000176890.11 | 2 |
| 1098 | | | |
| SEQ ID NO: | DGEWEPPVIQNPEYK | ENSG00000179218.9 | 2 |
| 1099 | | | |
| SEQ ID NO: | DTSPAPSGTTSAFVK | ENSG00000205277.5 | 2 |
| 1100 | | | |
| SEQ ID NO: | EAEDRARQEEERR | ENSG00000130396.16 | 2 |
| 1101 | | | |
| SEQ ID NO: | EAPYGAPR | ENSG00000090006.13 | 2 |
| 1102 | | | |
| SEQ ID NO: | ECAIYTNR | ENSG00000104450.8 | 2 |
| 1103 | | | |
| SEQ ID NO: | EGIVALRR | ENSG00000146731.6 | 2 |
| 1104 | | | |
| SEQ ID NO: | EGPYTVDAIQK | ENSG00000198947.10 | 2 |
| 1105 | | | |
| SEQ ID NO: | EKELQTIFDTLPPMR | ENSG00000198947.10 | 2 |
| 1106 | | | |
| SEQ ID NO: | ELEQQLQESAR | ENSG00000019144.12 | 2 |
| 1107 | | | |
| SEQ ID NO: | EQLDKIQSSHNFQLESVNK | ENSG00000135052.12 | 2 |
| 1108 | | | |
| SEQ ID NO: | EVTKEEFVLAAQK | ENSG00000004864.9 | 2 |
| 1109 | | | |
| SEQ ID NO: | EVVPGDSVNSLLSILDVITGHQHP | ENSG00000032444.11 | 2 |
| 1110 | QR | | |
| SEQ ID NO: | EYWMDPEGEMKPGRK | ENSG00000113387.7 | 2 |
| 1111 | | | |
| SEQ ID NO: | FGFSHLEALLDDSK | ENSG00000167770.7 | 2 |
| 1112 | | | |
| SEQ ID NO: | FGSQASQK | ENSG00000101199.8 | 2 |
| 1113 | | | |
| SEQ ID NO: | FHELTQTDK | ENSG00000100714.11 | 2 |
| 1114 | | | |
| SEQ ID NO: | FLDLGISIAENR | ENSG00000125826.15 | 2 |
| 1115 | | | |
| SEQ ID NO: | FLLDCGIR | ENSG00000065534.14 | 2 |
| 1116 | | | |
| SEQ ID NO: | FVDPSQDHALAK | ENSG00000130396.16 | 2 |
| 1117 | | | |
| SEQ ID NO: | FYGDEEK | ENSG00000179218.9 | 2 |
| 1118 | | | |
| SEQ ID NO: | GAWLGMNFNPK | ENSG00000011028.9 | 2 |
| 1119 | | | |
| SEQ ID NO: | GILVFQLK | ENSG00000130396.16 | 2 |
| 1120 | | | |
| SEQ ID NO: | GISLNPEQWSQL | ENSG00000113387.7 | 2 |
| 1121 | | | |
| SEQ ID NO: | GLYLPLFKPSVSTSK | ENSG00000004864.9 | 2 |
| 1122 | | | |
| SEQ ID NO: | GMEDLIPLVNR | ENSG00000106976.14 | 2 |
| 1123 | | | |
| SEQ ID NO: | GPIGHQGPIGQEGAPGR | ENSG00000134871.13 | 2 |
| 1124 | | | |
| SEQ ID NO: | GPNKHTLTQIK | ENSG00000146731.6 | 2 |
| 1125 | | | |
| SEQ ID NO: | GPTCNEFTGQCHCR | ENSG00000172037.9 | 2 |
| 1126 | | | |
| SEQ ID NO: | GSEGEPGIR | ENSG00000134871.13 | 2 |
| 1127 | | | |
| SEQ ID NO: | GTDVREPDDSPQGR | ENSG00000011028.9 | 2 |
| 1128 | | | |
| SEQ ID NO: | GWAGDSGPQGR | ENSG00000134871.13 | 2 |
| 1129 | | | |
| SEQ ID NO: | HAQEELPPPPPQKK | ENSG00000198947.10 | 2 |
| 1130 | | | |
| SEQ ID NO: | HSTVLENTDGK | ENSG00000163975.7 | 2 |
| 1131 | | | |
| SEQ ID NO: | IEELEEALR | ENSG00000082805.15 | 2 |
| 1132 | | | |
| SEQ ID NO: | IEGSGDQIDTYELSGGAR | ENSG00000106976.14 | 2 |
| 1133 | | | |
| SEQ ID NO: | IELHGKPIEVEHSVPK | ENSG00000136231.9 | 2 |
| 1134 | | | |
| SEQ ID NO: | IIDEDFELTERECIK | ENSG00000065534.14 | 2 |
| 1135 | | | |
| SEQ ID NO: | IKLIDFGLAR | ENSG00000065534.14 | 2 |
| 1136 | | | |
| SEQ ID NO: | ILDLLNEGSAR | ENSG00000079616.8 | 2 |
| 1137 | | | |
| SEQ ID NO: | ILMELDGPNWR | ENSG00000104450.8 | 2 |
| 1138 | | | |
| SEQ ID NO: | IPQAVVDVSSHLQK | ENSG00000171488.10 | 2 |
| 1139 | | | |
| SEQ ID NO: | IQAEQVDAVTLSGEDIYTAGK | ENSG00000163975.7 | 2 |
| 1140 | | | |
| SEQ ID NO: | IVIYVQQTTNK | ENSG00000011454.12 | 2 |
| 1141 | | | |
| SEQ ID NO: | IVSEFDYVEK | ENSG00000166825.9 | 2 |
| 1142 | | | |
| SEQ ID NO: | KADTLPR | ENSG00000049323.11 | 2 |
| 1143 | | | |
| SEQ ID NO: | KINQLSEENGDLSFK | ENSG00000137497.13 | 2 |
| 1144 | | | |
| SEQ ID NO: | KIQEILTQVK | ENSG00000136231.9 | 2 |
| 1145 | | | |
| SEQ ID NO: | KKLPAENGSSSAETLNAK | ENSG00000065534.14 | 2 |
| 1146 | | | |
| SEQ ID NO: | KLLLQCQVSSDPPATIIWTLNGK | ENSG00000065534.14 | 2 |
| 1147 | | | |
| SEQ ID NO: | KPAAGLSAAPVPTAPAAGAPL | ENSG00000115310.13 | 2 |
| 1148 | | | |
| SEQ ID NO: | KSPSSDSWTCADTSTER | ENSG00000101199.8 | 2 |
| 1149 | | | |
| SEQ ID NO: | KSSTGSPTSPLNAEK | ENSG00000065534.14 | 2 |
| 1150 | | | |
| SEQ ID NO: | LALLNEK | ENSG00000137497.13 | 2 |
| 1151 | | | |
| SEQ ID NO: | LDIDEK | ENSG00000130396.16 | 2 |
| 1152 | | | |
| SEQ ID NO: | LIAPLEGYTR | ENSG00000167608.7 | 2 |
| 1153 | | | |
| SEQ ID NO: | LKEEEEDKK | ENSG00000179218.9 | 2 |
| 1154 | | | |
| SEQ ID NO: | LKNQVTQLKEQVPGFTPR | ENSG00000100714.11 | 2 |
| 1155 | | | |
| SEQ ID NO: | LLDPQTNTEIANYPIYK | ENSG00000011454.12 | 2 |
| 1156 | | | |
| SEQ ID NO: | LLDRLPSFQQSCR | ENSG00000213380.9 | 2 |
| 1157 | | | |
| SEQ ID NO: | LLEAIKR | ENSG00000112096.12 | 2 |
| 1158 | | | |
| SEQ ID NO: | LLGFGSALLDNVDPNPENFVGA | ENSG00000196961.8 | 2 |
| 1159 | GIIQTK | | |
| SEQ ID NO: | LQAQLNELQAQLSQKEQAAEHY | ENSG00000137497.13 | 2 |
| 1160 | K | | |
| SEQ ID NO: | LQDVHVAEGKK | ENSG00000065534.14 | 2 |
| 1161 | | | |
| SEQ ID NO: | LQGEVLALEEER | ENSG00000019144.12 | 2 |
| 1162 | | | |
| SEQ ID NO: | LSALHLEVR | ENSG00000165912.11 | 2 |
| 1163 | | | |
| SEQ ID NO: | LSSQLVEHCQK | ENSG00000198947.10 | 2 |
| 1164 | | | |
| SEQ ID NO: | LSVMGCDVLK | ENSG00000163975.7 | 2 |
| 1165 | | | |
| SEQ ID NO: | LTAASVGVQGSGWGWLGFNKE | ENSG00000112096.12 | 2 |
| 1166 | R | | |
| SEQ ID NO: | LTDVAIGAPGEEDNR | ENSG00000169896.12 | 2 |
| 1167 | | | |
| SEQ ID NO: | LTHGVLHTK | ENSG00000105223.14 | 2 |
| 1168 | | | |
| SEQ ID NO: | LVTDPDSGLCSHYWGAIIR | ENSG00000130396.16 | 2 |
| 1169 | | | |
| SEQ ID NO: | MDPEGEMKPGR | ENSG00000113387.7 | 2 |
| 1170 | | | |
| SEQ ID NO: | MELLVK | ENSG00000145362.12 | 2 |
| 1171 | | | |
| SEQ ID NO: | MVSMMEGVIQK | ENSG00000130396.16 | 2 |
| 1172 | | | |
| SEQ ID NO: | MVVASSK | ENSG00000100714.11 | 2 |
| 1173 | | | |
| SEQ ID NO: | NDAGQAECSCQVTVDDAPASE | ENSG00000065534.14 | 2 |
| 1174 | NTKAPEMK | | |
| SEQ ID NO: | NILSEFQR | ENSG00000198947.10 | 2 |
| 1175 | | | |
| SEQ ID NO: | NLLEVSEVEQELACQNDHSSALQ | ENSG00000136631.8 | 2 |
| 1176 | NIK | | |
| SEQ ID NO: | NLVDSYMAIVNK | ENSG00000106976.14 | 2 |
| 1177 | | | |
| SEQ ID NO: | NVNVFFPHFK | ENSG00000151116.12 | 2 |
| 1178 | | | |
| SEQ ID NO: | PASAEQIQHLAGAIAER | ENSG00000172037.9 | 2 |
| 1179 | | | |
| SEQ ID NO: | PAVPASVPLQAWHPAK | ENSG00000104450.8 | 2 |
| 1180 | | | |
| SEQ ID NO: | PFSAIYFPCYAHVK | ENSG00000004864.9 | 2 |
| 1181 | | | |
| SEQ ID NO: | PGPVPAHSLCGHLVPK | ENSG00000172037.9 | 2 |
| 1182 | | | |
| SEQ ID NO: | PLQGTTGLIPLLGIDVWEHAYYL | ENSG00000112096.12 | 2 |
| 1183 | QYK | | |
| SEQ ID NO: | PNENKFAVGSGSR | ENSG00000130429.8 | 2 |
| 1184 | | | |
| SEQ ID NO: | PPVQFSLLHSK | ENSG00000196961.8 | 2 |
| 1185 | | | |
| SEQ ID NO: | QAPIGGDFPAVQK | ENSG00000198947.10 | 2 |
| 1186 | | | |
| SEQ ID NO: | QKLQDVHVAEGK | ENSG00000065534.14 | 2 |
| 1187 | | | |
| SEQ ID NO: | QLAAYIADKVDAAQMPQEAQK | ENSG00000198947.10 | 2 |
| 1188 | | | |
| SEQ ID NO: | QLSESSKLK | ENSG00000157617.12 | 2 |
| 1189 | | | |
| SEQ ID NO: | QQTANKVEIEK | ENSG00000011454.12 | 2 |
| 1190 | | | |
| SEQ ID NO: | QSSSSRDDNMFQIGK | ENSG00000113387.7 | 2 |
| 1191 | | | |
| SEQ ID NO: | QYTYGLVSCGLDR | ENSG00000004139.9 | 2 |
| 1192 | | | |
| SEQ ID NO: | RAGNSLAASTAEETAGSAQGR | ENSG00000172037.9 | 2 |
| 1193 | | | |
| SEQ ID NO: | REAPYGAPR | ENSG00000090006.13 | 2 |
| 1194 | | | |
| SEQ ID NO: | REPAPNAPGDIAAAFPAER | ENSG00000138162.13 | 2 |
| 1195 | | | |
| SEQ ID NO: | RGWDSSHEDDLPVYLAR | ENSG00000113657.8 | 2 |
| 1196 | | | |
| SEQ ID NO: | RLEEESAQLK | ENSG00000011454.12 | 2 |
| 1197 | | | |
| SEQ ID NO: | RQVEKEETNEIQVVNEEPQR | ENSG00000135052.12 | 2 |
| 1198 | | | |
| SEQ ID NO: | RSESQGTAPAFK | ENSG00000065534.14 | 2 |
| 1199 | | | |
| SEQ ID NO: | SCTEETHGFICQK | ENSG00000011028.9 | 2 |
| 1200 | | | |
| SEQ ID NO: | SDFGKFVLSSGK | ENSG00000179218.9 | 2 |
| 1201 | | | |
| SEQ ID NO: | SEYMEGNVR | ENSG00000166825.9 | 2 |
| 1202 | | | |
| SEQ ID NO: | SFAPILPHLAEEVFQHIPYIK | ENSG00000067704.8 | 2 |
| 1203 | | | |
| SEQ ID NO: | SKVPQETQSGGGSR | ENSG00000049323.11 | 2 |
| 1204 | | | |
| SEQ ID NO: | SPATTLSPASTTSSGVSEESTTSHS | ENSG00000205277.5 | 2 |
| 1205 | R | | |
| SEQ ID NO: | SPATTLSPASTTSSGVSEESTTSHS | ENSG00000205277.5 | 2 |
| 1206 | R | | |
| SEQ ID NO: | SPATTLSPASTTSSGVSEESTTSHS | ENSG00000205277.5 | 2 |
| 1207 | RPGSTHTTAFPDSTTTPGLSR | | |
| SEQ ID NO: | SPATTLSPASTTSSGVSEESTTSHS | ENSG00000205277.5 | 2 |
| 1208 | RPGSTHTTAFPDSTTTPGLSR | | |
| SEQ ID NO: | SQDLQVIDLLTVGESR | ENSG00000169231.9 | 2 |
| 1209 | | | |
| SEQ ID NO: | SREPQAKPQLDLSIDSLDLSCEEG | ENSG00000137497.13 | 2 |
| 1210 | TPLSITSK | | |
| SEQ ID NO: | SRQELASGLPSPAATQELPVER | ENSG00000138162.13 | 2 |
| 1211 | | | |
| SEQ ID NO: | SSAAAGAPSR | ENSG00000049323.11 | 2 |
| 1212 | | | |
| SEQ ID NO: | SSPNVANQPPSPGGK | ENSG00000130396.16 | 2 |
| 1213 | | | |
| SEQ ID NO: | SSSEVLVLAETLDGVR | ENSG00000130589.12 | 2 |
| 1214 | | | |
| SEQ ID NO: | SVQEIAEQLLLENHPAR | ENSG00000151914.13 | 2 |
| 1215 | | | |
| SEQ ID NO: | TCTGYHQVR | ENSG00000133316.11 | 2 |
| 1216 | | | |
| SEQ ID NO: | TGETSR | ENSG00000113387.7 | 2 |
| 1217 | | | |
| SEQ ID NO: | TIQNQLR | ENSG00000169896.12 | 2 |
| 1218 | | | |
| SEQ ID NO: | TLFSLMQYSEEFR | ENSG00000169896.12 | 2 |
| 1219 | | | |
| SEQ ID NO: | TPAPDGPR | ENSG00000032444.11 | 2 |
| 1220 | | | |
| SEQ ID NO: | TPGQIVSEK | ENSG00000059691.7 | 2 |
| 1221 | | | |
| SEQ ID NO: | TPVPEK | ENSG00000065534.14 | 2 |
| 1222 | | | |
| SEQ ID NO: | TTLLDPDSCR | ENSG00000205277.5 | 2 |
| 1223 | | | |
| SEQ ID NO: | TTTESEVMK | ENSG00000100714.11 | 2 |
| 1224 | | | |
| SEQ ID NO: | TVLQIDCGLQLANDSVNR | ENSG00000104450.8 | 2 |
| 1225 | | | |
| SEQ ID NO: | VAQQPLSLVGCEVVPDPSPDHLY | ENSG00000169129.10 | 2 |
| 1226 | SFR | | |
| SEQ ID NO: | VHALNNVNK | ENSG00000198947.10 | 2 |
| 1227 | | | |
| SEQ ID NO: | VIVMPTTK | ENSG00000067704.8 | 2 |
| 1228 | | | |
| SEQ ID NO: | VLQEDLEQEQVR | ENSG00000198947.10 | 2 |
| 1229 | | | |
| SEQ ID NO: | VPAHAVVVR | ENSG00000163975.7 | 2 |
| 1230 | | | |
| SEQ ID NO: | WLNEVEFK | ENSG00000198947.10 | 2 |
| 1231 | | | |
| SEQ ID NO: | WTDGSIINFISWAPGK | ENSG00000011028.9 | 2 |
| 1232 | | | |
| SEQ ID NO: | WTDGSIINFISWAPGKPR | ENSG00000011028.9 | 2 |
| 1233 | | | |
| SEQ ID NO: | WVNAQFSK | ENSG00000198947.10 | 2 |
| 1234 | | | |
| SEQ ID NO: | YDNFGVLGLDLWQVK | ENSG00000179218.9 | 2 |
| 1235 | | | |
| SEQ ID NO: | YLLYRPGHYDILYK | ENSG00000167770.7 | 2 |
| 1236 | | | |
| SEQ ID NO: | YLSSLDLLLEHR | ENSG00000133315.6 | 2 |
| 1237 | | | |
| SEQ ID NO: | YLVHCLQSELNNYMPAFLDDPEE | ENSG00000130396.16 | 2 |
| 1238 | NSLQRPK | | |
| SEQ ID NO: | YRDPGVLPWGALEEEEEDGGR | ENSG00000167608.7 | 2 |
| 1239 | | | |
| SEQ ID NO: | AAAAAVGPGAGGAGSAVPGGA | ENSG00000142453.7 | 1 |
| 1240 | GPCATVSVFPGAR | | |
| SEQ ID NO: | AAAKVALTKRADPAELR | ENSG00000004864.9 | 1 |
| 1241 | | | |
| SEQ ID NO: | AAATEEPEVIPDPAK | ENSG00000152894.10 | 1 |
| 1242 | | | |
| SEQ ID NO: | AAEEPQQQK | ENSG00000167770.7 | 1 |
| 1243 | | | |
| SEQ ID NO: | AAGDGSPDIGPTGELSGSLKIPNR | ENSG00000127084.13 | 1 |
| 1244 | | | |
| SEQ ID NO: | AAGLQAEIGQVK | ENSG00000082805.15 | 1 |
| 1245 | | | |
| SEQ ID NO: | AASGVPR | ENSG00000155629.10 | 1 |
| 1246 | | | |
| SEQ ID NO: | ACGNMFGLMHGTCPETSGGLLI | ENSG00000086475.10 | 1 |
| 1247 | CLPR | | |
| SEQ ID NO: | ADSAVSQEQLR | ENSG00000165912.11 | 1 |
| 1248 | | | |
| SEQ ID NO: | AEEKPHVKPYFSK | ENSG00000065534.14 | 1 |
| 1249 | | | |
| SEQ ID NO: | AELEYNPEHVSR | ENSG00000067704.8 | 1 |
| 1250 | | | |
| SEQ ID NO: | AEQLLQDAR | ENSG00000172037.9 | 1 |
| 1251 | | | |
| SEQ ID NO: | AEYMRIQAQQQATKPSKEMS | ENSG00000017373.11 | 1 |
| 1252 | | | |
| SEQ ID NO: | AFCGLGTTGMWR | ENSG00000110237.3 | 1 |
| 1253 | | | |
| SEQ ID NO: | AFLEAVAEEKPHVKPYFSK | ENSG00000065534.14 | 1 |
| 1254 | | | |
| SEQ ID NO: | AHKQCALKLLR | ENSG00000141447.12 | 1 |
| 1255 | | | |
| SEQ ID NO: | ALMDLLQLTR | ENSG00000079616.8 | 1 |
| 1256 | | | |
| SEQ ID NO: | ALQDFEEPDK | ENSG00000061938.12 | 1 |
| 1257 | | | |
| SEQ ID NO: | ALQFLEEVKVSR | ENSG00000146731.6 | 1 |
| 1258 | | | |
| SEQ ID NO: | ALQHMAAMSSAQIVSATAIHNK | ENSG00000187079.10 | 1 |
| 1259 | LGLPGIPRPT | | |
| SEQ ID NO: | AMAYETLEQYGK | ENSG00000104450.8 | 1 |
| 1260 | | | |
| SEQ ID NO: | AMLAAVLEQELPALAENLHQEQ | ENSG00000142733.10 | 1 |
| 1261 | K | | |
| SEQ ID NO: | AMLAAVLEQELPALAENLHQEQ | ENSG00000142733.10 | 1 |
| 1262 | K | | |
| SEQ ID NO: | ANGITMYAVGVGKAIEEELQEIA | ENSG00000132561.9 | 1 |
| 1263 | SEPTNK | | |
| SEQ ID NO: | APAPDVPGCSR | ENSG00000172037.9 | 1 |
| 1264 | | | |
| SEQ ID NO: | APILPHLAEEVFQHIPYIK | ENSG00000067704.8 | 1 |
| 1265 | | | |
| SEQ ID NO: | AQALLADVDTLLFDCDGVLWR | ENSG00000184207.8 | 1 |
| 1266 | | | |
| SEQ ID NO: | AQNSGFDLQETLVK | ENSG00000146731.6 | 1 |
| 1267 | | | |
| SEQ ID NO: | ARFEQMAK | ENSG00000162614.14 | 1 |
| 1268 | | | |
| SEQ ID NO: | ARPEAYQVPASYQPDEEER | ENSG00000125826.15 | 1 |
| 1269 | | | |
| SEQ ID NO: | ARTSAGVGAWGAAAVGRTAGV | ENSG00000133315.6 | 1 |
| 1270 | R | | |
| SEQ ID NO: | ASIPLKELEQFNSDIQK | ENSG00000198947.10 | 1 |
| 1271 | | | |
| SEQ ID NO: | ATSCFPRPMTPRDR | ENSG00000137497.13 | 1 |
| 1272 | | | |
| SEQ ID NO: | AVTSVSGPGEHLR | ENSG00000169231.9 | 1 |
| 1273 | | | |
| SEQ ID NO: | CAEVVSGK | ENSG00000067704.8 | 1 |
| 1274 | | | |
| SEQ ID NO: | CFGLLLSPGK | ENSG00000011454.12 | 1 |
| 1275 | | | |
| SEQ ID NO: | CGDSDKGFVVINQK | ENSG00000146731.6 | 1 |
| 1276 | | | |
| SEQ ID NO: | CGGLSCNGAAATADLALGR | ENSG00000172037.9 | 1 |
| 1277 | | | |
| SEQ ID NO: | CLCPPDFAGK | ENSG00000090006.13 | 1 |
| 1278 | | | |
| SEQ ID NO: | CLQHPWLMK | ENSG00000065534.14 | 1 |
| 1279 | | | |
| SEQ ID NO: | CLVENAGDVAFVR | ENSG00000163975.7 | 1 |
| 1280 | | | |
| SEQ ID NO: | CSGNIDPMDPDACDPHTGQCLR | ENSG00000172037.9 | 1 |
| 1281 | | | |
| SEQ ID NO: | CTEGPIDLVFVIDGSK | ENSG00000132561.9 | 1 |
| 1282 | | | |
| SEQ ID NO: | CTQCLQHPWLMK | ENSG00000065534.14 | 1 |
| 1283 | | | |
| SEQ ID NO: | CVRWAPNENK | ENSG00000130429.8 | 1 |
| 1284 | | | |
| SEQ ID NO: | DALLEALK | ENSG00000172037.9 | 1 |
| 1285 | | | |
| SEQ ID NO: | DCCFEISAPDKR | ENSG00000005020.8 | 1 |
| 1286 | | | |
| SEQ ID NO: | DDRTGTGTLSVFGMQARYSLR | ENSG00000176890.11 | 1 |
| 1287 | | | |
| SEQ ID NO: | DEDFELTERECIK | ENSG00000065534.14 | 1 |
| 1288 | | | |
| SEQ ID NO: | DISLQGPGLAPE | ENSG00000019144.12 | 1 |
| 1289 | | | |
| SEQ ID NO: | DITAALAAER | ENSG00000106976.14 | 1 |
| 1290 | | | |
| SEQ ID NO: | DLNVISSLLK | ENSG00000225485.3 | 1 |
| 1291 | | | |
| SEQ ID NO: | DQREPLPPAPAENEMK | ENSG00000104728.11 | 1 |
| 1292 | | | |
| SEQ ID NO: | DQSPLVSSSDSPPRPQPAFK | ENSG00000115310.13 | 1 |
| 1293 | | | |
| SEQ ID NO: | DRRGSGKPR | ENSG00000130396.16 | 1 |
| 1294 | | | |
| SEQ ID NO: | DSSHAFTLDELR | ENSG00000163975.7 | 1 |
| 1295 | | | |
| SEQ ID NO: | DWDSPYSHDLDTSADSVGNACR | ENSG00000105223.14 | 1 |
| 1296 | | | |
| SEQ ID NO: | EAEQLLRGPLGDQYQTVK | ENSG00000172037.9 | 1 |
| 1297 | | | |
| SEQ ID NO: | EAEVQTWLQQIGFSK | ENSG00000004139.9 | 1 |
| 1298 | | | |
| SEQ ID NO: | EDTVQSVK | ENSG00000106066.9 | 1 |
| 1299 | | | |
| SEQ ID NO: | EEAEQVLGQAR | ENSG00000198947.10 | 1 |
| 1300 | | | |
| SEQ ID NO: | EGIVALR | ENSG00000146731.6 | 1 |
| 1301 | | | |
| SEQ ID NO: | EGTEAEPLPLR | ENSG00000142733.10 | 1 |
| 1302 | | | |
| SEQ ID NO: | EGTEAEPLPLR | ENSG00000142733.10 | 1 |
| 1303 | | | |
| SEQ ID NO: | EGTPGIFQK | ENSG00000205277.5 | 1 |
| 1304 | | | |
| SEQ ID NO: | EGVIQNFK | ENSG00000130396.16 | 1 |
| 1305 | | | |
| SEQ ID NO: | EIDAALQK | ENSG00000162614.14 | 1 |
| 1306 | | | |
| SEQ ID NO: | EIHTVPDMGKWKR | ENSG00000119383.15 | 1 |
| 1307 | | | |
| SEQ ID NO: | EKLTAASVGVQGSGWGWLGFN | ENSG00000112096.12 | 1 |
| 1308 | K | | |
| SEQ ID NO: | ELEAKMLAQKAEEKENHCPTML | ENSG00000079616.8 | 1 |
| 1309 | R | | |
| SEQ ID NO: | ELEEKDGDVQAGANLSFNR | ENSG00000158560.10 | 1 |
| 1310 | | | |
| SEQ ID NO: | ELETLTTNYQWLCTR | ENSG00000198947.10 | 1 |
| 1311 | | | |
| SEQ ID NO: | ELLLSGPPEVAAPDTPYLHVDSA | ENSG00000138162.13 | 1 |
| 1312 | AQR | | |
| SEQ ID NO: | ELQDGIGQR | ENSG00000198947.10 | 1 |
| 1313 | | | |
| SEQ ID NO: | EMSKKAPSEISRK | ENSG00000198947.10 | 1 |
| 1314 | | | |
| SEQ ID NO: | ENIRQEISIMNCLHHPK | ENSG00000065534.14 | 1 |
| 1315 | | | |
| SEQ ID NO: | EPMKAPLCGEGDQPGGFESQEK | ENSG00000138162.13 | 1 |
| 1316 | | | |
| SEQ ID NO: | EPYAREMLAISFISAVNR | ENSG00000225485.3 | 1 |
| 1317 | | | |
| SEQ ID NO: | ERARKFSGSGLAMGLGSASASA | ENSG00000082458.7 | 1 |
| 1318 | WRR | | |
| SEQ ID NO: | ERARKFSGSGLAMGLGSASASA | ENSG00000082458.7 | 1 |
| 1319 | WRR | | |
| SEQ ID NO: | ERVLSLSQALATEASQWHR | ENSG00000105559.7 | 1 |
| 1320 | | | |
| SEQ ID NO: | ESGRGSSTPPGPIAALGMPDTGP | ENSG00000127084.13 | 1 |
| 1321 | GSSSLGK | | |
| SEQ ID NO: | ESGSLEDDWDFLPPKK | ENSG00000179218.9 | 1 |
| 1322 | | | |
| SEQ ID NO: | EVARNVFECNDQVVK | ENSG00000169896.12 | 1 |
| 1323 | | | |
| SEQ ID NO: | EVPEEGPGAPAR | ENSG00000186635.10 | 1 |
| 1324 | | | |
| SEQ ID NO: | EYQEDLALR | ENSG00000125826.15 | 1 |
| 1325 | | | |
| SEQ ID NO: | FAGDSLK | ENSG00000151914.13 | 1 |
| 1326 | | | |
| SEQ ID NO: | FGPGDQVR | ENSG00000114331.8 | 1 |
| 1327 | | | |
| SEQ ID NO: | FGVLGLDLWQVK | ENSG00000179218.9 | 1 |
| 1328 | | | |
| SEQ ID NO: | FKDNPTVVVEDLR | ENSG00000114331.8 | 1 |
| 1329 | | | |
| SEQ ID NO: | FNGAPTANFQQDVGTK | ENSG00000073849.10 | 1 |
| 1330 | | | |
| SEQ ID NO: | FNHPAEAKWMK | ENSG00000019144.12 | 1 |
| 1331 | | | |
| SEQ ID NO: | FNRALNCMNLPPDK | ENSG00000184922.9 | 1 |
| 1332 | | | |
| SEQ ID NO: | FRLAEDGKR | ENSG00000132561.9 | 1 |
| 1333 | | | |
| SEQ ID NO: | FSAEALR | ENSG00000073849.10 | 1 |
| 1334 | | | |
| SEQ ID NO: | FSPEVPGQK | ENSG00000131711.10 | 1 |
| 1335 | | | |
| SEQ ID NO: | FTDFEEVR | ENSG00000106976.14 | 1 |
| 1336 | | | |
| SEQ ID NO: | FVPIIGIAMPLSSR | ENSG00000151835.9 | 1 |
| 1337 | | | |
| SEQ ID NO: | FWPAIDDGLRR | ENSG00000105223.14 | 1 |
| 1338 | | | |
| SEQ ID NO: | FWVVDQTHFYLGSANMDWR | ENSG00000105223.14 | 1 |
| 1339 | | | |
| SEQ ID NO: | GAAVDEYFRQPVVDTFDIR | ENSG00000142453.7 | 1 |
| 1340 | | | |
| SEQ ID NO: | GAFHRPVLGGFR | ENSG00000165912.11 | 1 |
| 1341 | | | |
| SEQ ID NO: | GAGLAWGVHDCQLCSER | ENSG00000090006.13 | 1 |
| 1342 | | | |
| SEQ ID NO: | GAPISAYQIVVEELHPHRT | ENSG00000152894.10 | 1 |
| 1343 | | | |
| SEQ ID NO: | GATGHPGGGQGAENPAGLKSQ | ENSG00000104450.8 | 1 |
| 1344 | GNELFR | | |
| SEQ ID NO: | GCLELIKETGVPIAGR | ENSG00000100714.11 | 1 |
| 1345 | | | |
| SEQ ID NO: | GCPQEDSDIAFLIDGSGSIIPHDF | ENSG00000169896.12 | 1 |
| 1346 | R | | |
| SEQ ID NO: | GDEGPIGHQGPIGQEGAPGRPG | ENSG00000134871.13 | 1 |
| 1347 | SPGLPGMPGR | | |
| SEQ ID NO: | GDKGERGAPGVTGPK | ENSG00000134871.13 | 1 |
| 1348 | | | |
| SEQ ID NO: | GDNVLINTFSGLLK | ENSG00000142733.10 | 1 |
| 1349 | | | |
| SEQ ID NO: | GDNVLINTFSGLLK | ENSG00000142733.10 | 1 |
| 1350 | | | |
| SEQ ID NO: | GDTGNPGAPGTPGTKGWAGDS | ENSG00000134871.13 | 1 |
| 1351 | GPQGRP | | |
| SEQ ID NO: | GEFAIDGYSVR | ENSG00000005020.8 | 1 |
| 1352 | | | |
| SEQ ID NO: | GEGLYADPYGLLHEGR | ENSG00000017373.11 | 1 |
| 1353 | | | |
| SEQ ID NO: | GEIAPLKENVSHVNDLAR | ENSG00000198947.10 | 1 |
| 1354 | | | |
| SEQ ID NO: | GEWKPRQIDNPDYK | ENSG00000179218.9 | 1 |
| 1355 | | | |
| SEQ ID NO: | GGCVALATGSAMGLWEVK | ENSG00000011028.9 | 1 |
| 1356 | | | |
| SEQ ID NO: | GGHDIILAAFDNFK | ENSG00000184922.9 | 1 |
| 1357 | | | |
| SEQ ID NO: | GGSQPPDIDKTELVEPTEYLVVHL | ENSG00000166825.9 | 1 |
| 1358 | K | | |
| SEQ ID NO: | GGVSAVPGFR | ENSG00000134871.13 | 1 |
| 1359 | | | |
| SEQ ID NO: | GHLQIAACPNQDPLQGTTGLIPL | ENSG00000112096.12 | 1 |
| 1360 | LGIDVWEHAY | | |
| SEQ ID NO: | GHPDRLPLQMALTELETLAEK | ENSG00000104728.11 | 1 |
| 1361 | | | |
| SEQ ID NO: | GKEAGEVR | ENSG00000169896.12 | 1 |
| 1362 | | | |
| SEQ ID NO: | GKNVLINKDIR | ENSG00000179218.9 | 1 |
| 1363 | | | |
| SEQ ID NO: | GLCFLFGSNLR | ENSG00000169896.12 | 1 |
| 1364 | | | |
| SEQ ID NO: | GLEEAVESACAMR | ENSG00000067704.8 | 1 |
| 1365 | | | |
| SEQ ID NO: | GLGKYICQKCHAIIDEQPL | ENSG00000169756.12 | 1 |
| 1366 | | | |
| SEQ ID NO: | GNCFCYGHASECAPAPGAPAHA | ENSG00000172037.9 | 1 |
| 1367 | EGMVHGACICK | | |
| SEQ ID NO: | GPAPARPKMLVISGGDGYEDFRL | ENSG00000110237.3 | 1 |
| 1368 | SSGGGSSS | | |
| SEQ ID NO: | GPGAGSALDDGRR | ENSG00000196961.8 | 1 |
| 1369 | | | |
| SEQ ID NO: | GPPSSVPK | ENSG00000184922.9 | 1 |
| 1370 | | | |
| SEQ ID NO: | GQLQDELEKGER | ENSG00000082805.15 | 1 |
| 1371 | | | |
| SEQ ID NO: | GQTPEAGADKRSPRRASAAAAA | ENSG00000104450.8 | 1 |
| 1372 | GGGATGHPGG | | |
| SEQ ID NO: | GREPASCEDLCGGGVGADGGGS | ENSG00000065534.14 | 1 |
| 1373 | DR | | |
| SEQ ID NO: | GRISVSLQEEASGGSLAAPAR | ENSG00000032444.11 | 1 |
| 1374 | | | |
| SEQ ID NO: | GSDGMDAVRSAPTLIR | ENSG00000150672.12 | 1 |
| 1375 | | | |
| SEQ ID NO: | GSRPGIEGDTPR | ENSG00000113657.8 | 1 |
| 1376 | | | |
| SEQ ID NO: | GTISFFEIDGR | ENSG00000172977.8 | 1 |
| 1377 | | | |
| SEQ ID NO: | GTWIHPEIDNPEYSPD | ENSG00000179218.9 | 1 |
| 1378 | | | |
| SEQ ID NO: | GVTDTLAQIR | ENSG00000017373.11 | 1 |
| 1379 | | | |
| SEQ ID NO: | GWDCHGLPIEIK | ENSG00000067704.8 | 1 |
| 1380 | | | |
| SEQ ID NO: | HCELCRPFFYR | ENSG00000172037.9 | 1 |
| 1381 | | | |
| SEQ ID NO: | HFQIDYDEDGNCSLIISDVCGDD | ENSG00000065534.14 | 1 |
| 1382 | DAK | | |
| SEQ ID NO: | HGGLSLVQTTDYIYPIVDDPYM | ENSG00000086475.10 | 1 |
| 1383 | MGR | | |
| SEQ ID NO: | HLDTLHNFVSR | ENSG00000151914.13 | 1 |
| 1384 | | | |
| SEQ ID NO: | HLNPGLQLYR | ENSG00000114331.8 | 1 |
| 1385 | | | |
| SEQ ID NO: | HTEILEILEIPQLMDTCVR | ENSG00000213380.9 | 1 |
| 1386 | | | |
| SEQ ID NO: | HTLTQIKDAVR | ENSG00000146731.6 | 1 |
| 1387 | | | |
| SEQ ID NO: | IAALNASSTIEDDHEGSFK | ENSG00000099991.12 | 1 |
| 1388 | | | |
| SEQ ID NO: | IAEIQAR | ENSG00000152894.10 | 1 |
| 1389 | | | |
| SEQ ID NO: | IDALREELMEGMDR | ENSG00000132205.6 | 1 |
| 1390 | | | |
| SEQ ID NO: | IFEEQPCLRK | ENSG00000099991.12 | 1 |
| 1391 | | | |
| SEQ ID NO: | IFLTEQPLEGLEK | ENSG00000198947.10 | 1 |
| 1392 | | | |
| SEQ ID NO: | IFSAYIK | ENSG00000130429.8 | 1 |
| 1393 | | | |
| SEQ ID NO: | IIDRIHGTEEGQQILK | ENSG00000137497.13 | 1 |
| 1394 | | | |
| SEQ ID NO: | ILHKGEELAK | ENSG00000169129.10 | 1 |
| 1395 | | | |
| SEQ ID NO: | INELENGGEILNETRSFHHK | ENSG00000059691.7 | 1 |
| 1396 | | | |
| SEQ ID NO: | IPASAEQIQHLAGAIAER | ENSG00000172037.9 | 1 |
| 1397 | | | |
| SEQ ID NO: | IQGTLQPH | ENSG00000172037.9 | 1 |
| 1398 | | | |
| SEQ ID NO: | IQNQWDEVQEHLQNR | ENSG00000198947.10 | 1 |
| 1399 | | | |
| SEQ ID NO: | IQNVVTSFAPQRRAAWWQSEN | ENSG00000172037.9 | 1 |
| 1400 | GIPA | | |
| SEQ ID NO: | IRQKVDDCERCR | ENSG00000011454.12 | 1 |
| 1401 | | | |
| SEQ ID NO: | ITEQEKLK | ENSG00000151914.13 | 1 |
| 1402 | | | |
| SEQ ID NO: | ITSVSTGNLCTEEQTPPPRPEAYPI | ENSG00000130396.16 | 1 |
| 1403 | PTQTYTR | | |
| SEQ ID NO: | IVLGGTTVHNTK | ENSG00000136631.8 | 1 |
| 1404 | | | |
| SEQ ID NO: | IVTTHIR | ENSG00000106976.14 | 1 |
| 1405 | | | |
| SEQ ID NO: | KDAEGILEDLQSYR | ENSG00000153310.14 | 1 |
| 1406 | | | |
| SEQ ID NO: | KDVEVTKEEFVLAAQK | ENSG00000004864.9 | 1 |
| 1407 | | | |
| SEQ ID NO: | KEADMQQK | ENSG00000158560.10 | 1 |
| 1408 | | | |
| SEQ ID NO: | KHPSSPECLVSAQK | ENSG00000137497.13 | 1 |
| 1409 | | | |
| SEQ ID NO: | KIQNHIQTLK | ENSG00000198947.10 | 1 |
| 1410 | | | |
| SEQ ID NO: | KISEESGETAKRR | ENSG00000099991.12 | 1 |
| 1411 | | | |
| SEQ ID NO: | KIYAVEASTMAQHAEVLVK | ENSG00000142453.7 | 1 |
| 1412 | | | |
| SEQ ID NO: | KKEELNAVR | ENSG00000198947.10 | 1 |
| 1413 | | | |
| SEQ ID NO: | KKGPGAGSALDDGR | ENSG00000196961.8 | 1 |
| 1414 | | | |
| SEQ ID NO: | KLMQIR | ENSG00000151914.13 | 1 |
| 1415 | | | |
| SEQ ID NO: | KLSSQLVEHCQK | ENSG00000198947.10 | 1 |
| 1416 | | | |
| SEQ ID NO: | KLTFEYR | ENSG00000119383.15 | 1 |
| 1417 | | | |
| SEQ ID NO: | KMEEEPLGPDLEDLKR | ENSG00000198947.10 | 1 |
| 1418 | | | |
| SEQ ID NO: | KMSGTVSK | ENSG00000136631.8 | 1 |
| 1419 | | | |
| SEQ ID NO: | KQVAPEKPVKK | ENSG00000113387.7 | 1 |
| 1420 | | | |
| SEQ ID NO: | KSSTGSPTSPLNAEKLESEEDVSQ | ENSG00000065534.14 | 1 |
| 1421 | AF | | |
| SEQ ID NO: | KTRPDGNCFYR | ENSG00000167770.7 | 1 |
| 1422 | | | |
| SEQ ID NO: | KVSTLQNQR | ENSG00000169896.12 | 1 |
| 1423 | | | |
| SEQ ID NO: | LAGEEEALR | ENSG00000125826.15 | 1 |
| 1424 | | | |
| SEQ ID NO: | LCDNIVSESESTTAR | ENSG00000170776.15 | 1 |
| 1425 | | | |
| SEQ ID NO: | LCIEHVEEHGLDIDGIYR | ENSG00000165322.13 | 1 |
| 1426 | | | |
| SEQ ID NO: | LCQFEEAKQDCDQALQLADGNV | ENSG00000104450.8 | 1 |
| 1427 | K | | |
| SEQ ID NO: | LDAWEEAQVEFMASHGNDAAR | ENSG00000105963.9 | 1 |
| 1428 | | | |
| SEQ ID NO: | LDEDLTTLGQMSK | ENSG00000110237.3 | 1 |
| 1429 | | | |
| SEQ ID NO: | LDLFEISQPTEDLEFHGVMR | ENSG00000130396.16 | 1 |
| 1430 | | | |
| SEQ ID NO: | LEAIKR | ENSG00000112096.12 | 1 |
| 1431 | | | |
| SEQ ID NO: | LEMLQQIANR | ENSG00000151914.13 | 1 |
| 1432 | | | |
| SEQ ID NO: | LESEEDVSQAFLEAVAEEKPHVK | ENSG00000065534.14 | 1 |
| 1433 | | | |
| SEQ ID NO: | LESEEDVSQAFLEAVAEEKPHVK | ENSG00000065534.14 | 1 |
| 1434 | PY | | |
| SEQ ID NO: | LETMARNEVIADINCK | ENSG00000141447.12 | 1 |
| 1435 | | | |
| SEQ ID NO: | LEYNVDAANGIVMEGYLFK | ENSG00000114331.8 | 1 |
| 1436 | | | |
| SEQ ID NO: | LFPNSLDQTDMHGDSEYNIMFG | ENSG00000179218.9 | 1 |
| 1437 | PDICGPGTKK | | |
| SEQ ID NO: | LGCTMSMR | ENSG00000059691.7 | 1 |
| 1438 | | | |
| SEQ ID NO: | LGIEKTDPTTLTDEEINR | ENSG00000100714.11 | 1 |
| 1439 | | | |
| SEQ ID NO: | LGIVNVDEAVLHFK | ENSG00000155629.10 | 1 |
| 1440 | | | |
| SEQ ID NO: | LGYTPLIVACHYGNVK | ENSG00000145362.12 | 1 |
| 1441 | | | |
| SEQ ID NO: | LHEMQIQHPTASLIAK | ENSG00000146731.6 | 1 |
| 1442 | | | |
| SEQ ID NO: | LHYNELGAK | ENSG00000198947.10 | 1 |
| 1443 | | | |
| SEQ ID NO: | LKAVQAQGGESQQEAQR | ENSG00000137497.13 | 1 |
| 1444 | | | |
| SEQ ID NO: | LKEDMKKIVAVPLNEQK | ENSG00000138640.10 | 1 |
| 1445 | | | |
| SEQ ID NO: | LKEEEEDKKR | ENSG00000179218.9 | 1 |
| 1446 | | | |
| SEQ ID NO: | LKELNDWLTK | ENSG00000198947.10 | 1 |
| 1447 | | | |
| SEQ ID NO: | LKLSFEEMER | ENSG00000162614.14 | 1 |
| 1448 | | | |
| SEQ ID NO: | LKLTFEELER | ENSG00000162614.14 | 1 |
| 1449 | | | |
| SEQ ID NO: | LKPEIQCVSAK | ENSG00000163975.7 | 1 |
| 1450 | | | |
| SEQ ID NO: | LLEATPTDSCGYFR | ENSG00000142733.10 | 1 |
| 1451 | | | |
| SEQ ID NO: | LLEATPTDSCGYFR | ENSG00000142733.10 | 1 |
| 1452 | | | |
| SEQ ID NO: | LLKGESALQR | ENSG00000114331.8 | 1 |
| 1453 | | | |
| SEQ ID NO: | LLNEGQR | ENSG00000163975.7 | 1 |
| 1454 | | | |
| SEQ ID NO: | LNGFQLENFTLK | ENSG00000136231.9 | 1 |
| 1455 | | | |
| SEQ ID NO: | LNKILK | ENSG00000067704.8 | 1 |
| 1456 | | | |
| SEQ ID NO: | LNREVAESPRPR | ENSG00000019144.12 | 1 |
| 1457 | | | |
| SEQ ID NO: | LPPSSPQKLADVAAPPGGPPPPH | ENSG00000017373.11 | 1 |
| 1458 | SPYSGPPSR | | |
| SEQ ID NO: | LQDAFSAIGQNADLDLPQIAVVG | ENSG00000106976.14 | 1 |
| 1459 | GQSAGK | | |
| SEQ ID NO: | LQELEGTYEENERALESK | ENSG00000172037.9 | 1 |
| 1460 | | | |
| SEQ ID NO: | LQQQCDDYGSSYLGVIELIGEK | ENSG00000132205.6 | 1 |
| 1461 | | | |
| SEQ ID NO: | LSAHTHTLSLTDINELVCGAPGD | ENSG00000172037.9 | 1 |
| 1462 | APCATSPCGGAGCR | | |
| SEQ ID NO: | LSFEEMERQRR | ENSG00000162614.14 | 1 |
| 1463 | | | |
| SEQ ID NO: | LSGWLAQQEDAHR | ENSG00000032444.11 | 1 |
| 1464 | | | |
| SEQ ID NO: | LSHFEYVKNEDLEK | ENSG00000061938.12 | 1 |
| 1465 | | | |
| SEQ ID NO: | LSIPQLSVTDYEIM | ENSG00000198947.10 | 1 |
| 1466 | | | |
| SEQ ID NO: | LSIPQLSVTDYEIMEQR | ENSG00000198947.10 | 1 |
| 1467 | | | |
| SEQ ID NO: | LSPAYSLGSLTGASPCQSPCVQR | ENSG00000019144.12 | 1 |
| 1468 | | | |
| SEQ ID NO: | LSSGGGSSSETVGR | ENSG00000110237.3 | 1 |
| 1469 | | | |
| SEQ ID NO: | LTEEQCLFSAWLSEKEDAVNK | ENSG00000198947.10 | 1 |
| 1470 | | | |
| SEQ ID NO: | LVAAGGLDAVLYWCR | ENSG00000004139.9 | 1 |
| 1471 | | | |
| SEQ ID NO: | LVEFSAFLEQQR | ENSG00000187079.10 | 1 |
| 1472 | | | |
| SEQ ID NO: | LVPSVNGVR | ENSG00000100714.11 | 1 |
| 1473 | | | |
| SEQ ID NO: | LVTPHGESEQIGVIPSKK | ENSG00000082458.7 | 1 |
| 1474 | | | |
| SEQ ID NO: | LVVTQEDVELAYQEAMMNMAR | ENSG00000086475.10 | 1 |
| 1475 | LNRTAAGLMH | | |
| SEQ ID NO: | MAAAEAGGDDAR | ENSG00000184207.8 | 1 |
| 1476 | | | |
| SEQ ID NO: | MAVWEAEQLGGLQR | ENSG00000130589.12 | 1 |
| 1477 | | | |
| SEQ ID NO: | MEALENR | ENSG00000132561.9 | 1 |
| 1478 | | | |
| SEQ ID NO: | MEFDEKELRR | ENSG00000106976.14 | 1 |
| 1479 | | | |
| SEQ ID NO: | MESGRGSSTPPGPIAALGMPDT | ENSG00000127084.13 | 1 |
| 1480 | GPG | | |
| SEQ ID NO: | MESGRGSSTPPGPIAALGMPDT | ENSG00000127084.13 | 1 |
| 1481 | GPGSSSLGK | | |
| SEQ ID NO: | MESQLK | ENSG00000082805.15 | 1 |
| 1482 | | | |
| SEQ ID NO: | MGMSFGLESGK | ENSG00000114126.13 | 1 |
| 1483 | | | |
| SEQ ID NO: | MGNAAGSAEQPAGPAAPPPK | ENSG00000184922.9 | 1 |
| 1484 | | | |
| SEQ ID NO: | MIISTPQRLTSSGSVLIGSPYTPAP | ENSG00000114126.13 | 1 |
| 1485 | AMVTQTHIA | | |
| SEQ ID NO: | MILTNPEGR | ENSG00000152894.10 | 1 |
| 1486 | | | |
| SEQ ID NO: | MKAAKSGTKDGLEK | ENSG00000074964.12 | 1 |
| 1487 | | | |
| SEQ ID NO: | MLEDLGFKDLTLQPR | ENSG00000125826.15 | 1 |
| 1488 | | | |
| SEQ ID NO: | MNSLTLNR | ENSG00000213380.9 | 1 |
| 1489 | | | |
| SEQ ID NO: | MSDKSDLKAELER | ENSG00000158560.10 | 1 |
| 1490 | | | |
| SEQ ID NO: | MSGSSGGAAAPAASSGPAAAAS | ENSG00000038382.13 | 1 |
| 1491 | AAGSGCGGGA | | |
| SEQ ID NO: | MSKSLGNVIHP | ENSG00000067704.8 | 1 |
| 1492 | | | |
| SEQ ID NO: | MVSTSATDEPR | ENSG00000032444.11 | 1 |
| 1493 | | | |
| SEQ ID NO: | NANSSPVASTTPSASATTNPASA | ENSG00000166825.9 | 1 |
| 1494 | TTLDQSKA | | |
| SEQ ID NO: | NATLVNEADKLR | ENSG00000166825.9 | 1 |
| 1495 | | | |
| SEQ ID NO: | NAVLEHMEELQEQVALLTER | ENSG00000184922.9 | 1 |
| 1496 | | | |
| SEQ ID NO: | NDKSYWLSTTAPLPMMPVAEDE | ENSG00000134871.13 | 1 |
| 1497 | IKPYISR | | |
| SEQ ID NO: | NFVKEAEEISSNRR | ENSG00000213380.9 | 1 |
| 1498 | | | |
| SEQ ID NO: | NILVSDMEMNEQQE | ENSG00000011028.9 | 1 |
| 1499 | | | |
| SEQ ID NO: | NLAATLQDIETK | ENSG00000019144.12 | 1 |
| 1500 | | | |
| SEQ ID NO: | NLEELYLVGSLSHDISR | ENSG00000171488.10 | 1 |
| 1501 | | | |
| SEQ ID NO: | NLLEVSEVEQELACQNDHSSALQ | ENSG00000136631.8 | 1 |
| 1502 | NIKR | | |
| SEQ ID NO: | NLVGSGSEIQFLSEAQDDPQKR | ENSG00000115652.10 | 1 |
| 1503 | | | |
| SEQ ID NO: | NRTEAEVKR | ENSG00000169129.10 | 1 |
| 1504 | | | |
| SEQ ID NO: | NSLSVLSPK | ENSG00000171488.10 | 1 |
| 1505 | | | |
| SEQ ID NO: | NTSAASTAQLVEATEELRR | ENSG00000172037.9 | 1 |
| 1506 | | | |
| SEQ ID NO: | NVQVFLISGGFR | ENSG00000146733.9 | 1 |
| 1507 | | | |
| SEQ ID NO: | NYPSSLCALCVGDEQGR | ENSG00000163975.7 | 1 |
| 1508 | | | |
| SEQ ID NO: | PCPCPEGPGSQR | ENSG00000172037.9 | 1 |
| 1509 | | | |
| SEQ ID NO: | PCQDVDECAR | ENSG00000090006.13 | 1 |
| 1510 | | | |
| SEQ ID NO: | PDENLKSASKEELKK | ENSG00000065534.14 | 1 |
| 1511 | | | |
| SEQ ID NO: | PEAYQVPASYQPDEEERAR | ENSG00000125826.15 | 1 |
| 1512 | | | |
| SEQ ID NO: | PEGEMKPGR | ENSG00000113387.7 | 1 |
| 1513 | | | |
| SEQ ID NO: | PETPYSGPGLLIDSLVLLPR | ENSG00000172037.9 | 1 |
| 1514 | | | |
| SEQ ID NO: | PEVVWFK | ENSG00000065534.14 | 1 |
| 1515 | | | |
| SEQ ID NO: | PGAGAVEVAMAEALIK | ENSG00000146731.6 | 1 |
| 1516 | | | |
| SEQ ID NO: | PGEMGPQGPPGEPGFRGAPGK | ENSG00000134871.13 | 1 |
| 1517 | | | |
| SEQ ID NO: | PGETPSWTGSGFVR | ENSG00000172037.9 | 1 |
| 1518 | | | |
| SEQ ID NO: | PGFHGQAAR | ENSG00000172037.9 | 1 |
| 1519 | | | |
| SEQ ID NO: | PGHVGQMGPVGAPGRPGPPGP | ENSG00000134871.13 | 1 |
| 1520 | PGPK | | |
| SEQ ID NO: | PILPHLAEEVFQHIPYIK | ENSG00000067704.8 | 1 |
| 1521 | | | |
| SEQ ID NO: | PKIDDVLHTLTGAMSLLRR | ENSG00000130396.16 | 1 |
| 1522 | | | |
| SEQ ID NO: | PKMLVISGGDGYEDFR | ENSG00000110237.3 | 1 |
| 1523 | | | |
| SEQ ID NO: | PPDIDKTELVEPTEYLVVHLK | ENSG00000166825.9 | 1 |
| 1524 | | | |
| SEQ ID NO: | PPKPATPDFR | ENSG00000065534.14 | 1 |
| 1525 | | | |
| SEQ ID NO: | PPVIQNPEYK | ENSG00000179218.9 | 1 |
| 1526 | | | |
| SEQ ID NO: | PPVLGTESDATVK | ENSG00000065534.14 | 1 |
| 1527 | | | |
| SEQ ID NO: | PQLLGVAPEK | ENSG00000004864.9 | 1 |
| 1528 | | | |
| SEQ ID NO: | PRMSAQEQLERMR | ENSG00000105559.7 | 1 |
| 1529 | | | |
| SEQ ID NO: | PSGPATAEDPGRRPVLPQR | ENSG00000132205.6 | 1 |
| 1530 | | | |
| SEQ ID NO: | PTPRPVPMKRHIFR | ENSG00000186635.10 | 1 |
| 1531 | | | |
| SEQ ID NO: | PVAGSELPR | ENSG00000176890.11 | 1 |
| 1532 | | | |
| SEQ ID NO: | PYWCISR | ENSG00000067704.8 | 1 |
| 1533 | | | |
| SEQ ID NO: | QAASPLEPK | ENSG00000137497.13 | 1 |
| 1534 | | | |
| SEQ ID NO: | QAEEVNTEWEK | ENSG00000198947.10 | 1 |
| 1535 | | | |
| SEQ ID NO: | QAEGLSEDGAAMAVEPTQIQLS | ENSG00000198947.10 | 1 |
| 1536 | K | | |
| SEQ ID NO: | QAPSSFQLLYDLK | ENSG00000100714.11 | 1 |
| 1537 | | | |
| SEQ ID NO: | QAQLEKELSAALQDKK | ENSG00000137497.13 | 1 |
| 1538 | | | |
| SEQ ID NO: | QAQVNLTVVDKPD | ENSG00000065534.14 | 1 |
| 1539 | | | |
| SEQ ID NO: | QDCDQALQLADGNVK | ENSG00000104450.8 | 1 |
| 1540 | | | |
| SEQ ID NO: | QEMVIEVKAIGGKK | ENSG00000110237.3 | 1 |
| 1541 | | | |
| SEQ ID NO: | QETPPPRSPPVANSGSTGFSRRG | ENSG00000105559.7 | 1 |
| 1542 | SGRGGGPTP | | |
| SEQ ID NO: | QGPMTQAINR | ENSG00000170776.15 | 1 |
| 1543 | | | |
| SEQ ID NO: | QHEVEEATNILTATR | ENSG00000114331.8 | 1 |
| 1544 | | | |
| SEQ ID NO: | QIASLTGLVQSALLR | ENSG00000017373.11 | 1 |
| 1545 | | | |
| SEQ ID NO: | QICSQLSER | ENSG00000011454.12 | 1 |
| 1546 | | | |
| SEQ ID NO: | QKASGDSAR | ENSG00000004864.9 | 1 |
| 1547 | | | |
| SEQ ID NO: | QKMEEEKRRTEEER | ENSG00000162614.14 | 1 |
| 1548 | | | |
| SEQ ID NO: | QLELACETQEEVDSWK | ENSG00000106976.14 | 1 |
| 1549 | | | |
| SEQ ID NO: | QLNETGGPVLVSAPISPEEQDKL | ENSG00000198947.10 | 1 |
| 1550 | ENK | | |
| SEQ ID NO: | QLPKPNQDTMQILFR | ENSG00000165322.13 | 1 |
| 1551 | | | |
| SEQ ID NO: | QLQTLAPK | ENSG00000105223.14 | 1 |
| 1552 | | | |
| SEQ ID NO: | QNGDSAYLYLLSAR | ENSG00000125826.15 | 1 |
| 1553 | | | |
| SEQ ID NO: | QPDVEEILSK | ENSG00000198947.10 | 1 |
| 1554 | | | |
| SEQ ID NO: | QQNLAVSESPVTPSALAELLDLLD | ENSG00000059691.7 | 1 |
| 1555 | SR | | |
| SEQ ID NO: | QQQMHIVDMLSK | ENSG00000130396.16 | 1 |
| 1556 | | | |
| SEQ ID NO: | QSSHNFQLESVNK | ENSG00000135052.12 | 1 |
| 1557 | | | |
| SEQ ID NO: | QTLLAESEALTSYSHR | ENSG00000167608.7 | 1 |
| 1558 | | | |
| SEQ ID NO: | QTSVADLLASFNDQSTSDYLVVY | ENSG00000167770.7 | 1 |
| 1559 | LR | | |
| SEQ ID NO: | QVFGQTTIHQHIPFNWDSEFVQ | ENSG00000004864.9 | 1 |
| 1560 | LHFGK | | |
| SEQ ID NO: | QVVQDLLK | ENSG00000141447.12 | 1 |
| 1561 | | | |
| SEQ ID NO: | RASAAAAAGGGATGHPGGGQG | ENSG00000104450.8 | 1 |
| 1562 | AENPAGLK | | |
| SEQ ID NO: | RCDLCAPGYYGFGPTGCQACQC | ENSG00000172037.9 | 1 |
| 1563 | SHEGALSSLCEK | | |
| SEQ ID NO: | RCEQVQPGYFR | ENSG00000172037.9 | 1 |
| 1564 | | | |
| SEQ ID NO: | RDNEVDGQDYHFVVSR | ENSG00000082458.7 | 1 |
| 1565 | | | |
| SEQ ID NO: | RDPSSNDINGGMEPTPSTVSTPS | ENSG00000196961.8 | 1 |
| 1566 | PSADLLGLR | | |
| SEQ ID NO: | REMAAASAAAISGAGR | ENSG00000079616.8 | 1 |
| 1567 | | | |
| SEQ ID NO: | RETLFTLDDQALGPELTAPAPEPP | ENSG00000213380.9 | 1 |
| 1568 | AEEPR | | |
| SEQ ID NO: | RFSTEYELQQLEQFK | ENSG00000166825.9 | 1 |
| 1569 | | | |
| SEQ ID NO: | RGSDELTVPRYR | ENSG00000017373.11 | 1 |
| 1570 | | | |
| SEQ ID NO: | RIEGSGDQIDTYELSGGAR | ENSG00000106976.14 | 1 |
| 1571 | | | |
| SEQ ID NO: | RKEEEEAEDK | ENSG00000179218.9 | 1 |
| 1572 | | | |
| SEQ ID NO: | RLDIDEKPLVVQLNWNKDDR | ENSG00000130396.16 | 1 |
| 1573 | | | |
| SEQ ID NO: | RPPEPEKAPPAAPTRPSALELK | ENSG00000184922.9 | 1 |
| 1574 | | | |
| SEQ ID NO: | RPRPQGRSVSEPR | ENSG00000125744.7 | 1 |
| 1575 | | | |
| SEQ ID NO: | RQAEGLSEDGAAMAVEPTQIQL | ENSG00000198947.10 | 1 |
| 1576 | SK | | |
| SEQ ID NO: | RRKVPPSGSGGSELSNGEAGEAY | ENSG00000110237.3 | 1 |
| 1577 | R | | |
| SEQ ID NO: | RSLELQTRTEEEKK | ENSG00000127084.13 | 1 |
| 1578 | | | |
| SEQ ID NO: | RSSYLLAITTERSK | ENSG00000225485.3 | 1 |
| 1579 | | | |
| SEQ ID NO: | RVAAQVDGGAQVQQVLNIECLR | ENSG00000196961.8 | 1 |
| 1580 | | | |
| SEQ ID NO: | SAEESDRLR | ENSG00000130396.16 | 1 |
| 1581 | | | |
| SEQ ID NO: | SCDCDPMGSQDGGR | ENSG00000172037.9 | 1 |
| 1582 | | | |
| SEQ ID NO: | SDVLETVVLINPSDEAVSTEVR | ENSG00000131711.10 | 1 |
| 1583 | | | |
| SEQ ID NO: | SEDYELLCPNGAR | ENSG00000163975.7 | 1 |
| 1584 | | | |
| SEQ ID NO: | SFGSSLMESEVNLDR | ENSG00000198947.10 | 1 |
| 1585 | | | |
| SEQ ID NO: | SGHDQVVELLLERGAPLLAR | ENSG00000145362.12 | 1 |
| 1586 | | | |
| SEQ ID NO: | SGLTSLHLAAQEDKVNVADILTK | ENSG00000145362.12 | 1 |
| 1587 | | | |
| SEQ ID NO: | SGRPSCLYSAARPSGSYR | ENSG00000124831.14 | 1 |
| 1588 | | | |
| SEQ ID NO: | SGTIFDNFLITNDEA | ENSG00000179218.9 | 1 |
| 1589 | | | |
| SEQ ID NO: | SGTLALVEPLVASLDPGR | ENSG00000004139.9 | 1 |
| 1590 | | | |
| SEQ ID NO: | SKIVGAPMHDLLLWNNATVTTC | ENSG00000100714.11 | 1 |
| 1591 | HSK | | |
| SEQ ID NO: | SKPEDWDER | ENSG00000179218.9 | 1 |
| 1592 | | | |
| SEQ ID NO: | SLEGSDDAVLLQRRLDNMNFKW | ENSG00000198947.10 | 1 |
| 1593 | SELR | | |
| SEQ ID NO: | SLNPEQWSQLK | ENSG00000113387.7 | 1 |
| 1594 | | | |
| SEQ ID NO: | SLSDPSRRGELAGPGFEGPGGEP | ENSG00000110237.3 | 1 |
| 1595 | IREV | | |
| SEQ ID NO: | SNRDELELELAENR | ENSG00000137497.13 | 1 |
| 1596 | | | |
| SEQ ID NO: | SPARPQPGEGPGGPGGPPEVSR | ENSG00000105559.7 | 1 |
| 1597 | | | |
| SEQ ID NO: | SPARPQPGEGPGGPGGPPEVSR | ENSG00000105559.7 | 1 |
| 1598 | | | |
| SEQ ID NO: | SPDTTLSPASTTSSGVSEESTTSHS | ENSG00000205277.5 | 1 |
| 1599 | R | | |
| SEQ ID NO: | SPDTTLSPASTTSSGVSEESTTSHS | ENSG00000205277.5 | 1 |
| 1600 | R | | |
| SEQ ID NO: | SPDTTLSPASTTSSGVSEESTTSHS | ENSG00000205277.5 | 1 |
| 1601 | R | | |
| SEQ ID NO: | SPFPSQHLEAPEDK | ENSG00000198947.10 | 1 |
| 1602 | | | |
| SEQ ID NO: | SPGPPQVDGTPTMSLERPPR | ENSG00000155629.10 | 1 |
| 1603 | | | |
| SEQ ID NO: | SPTTTLSPASMTSLGVGEESTTSR | ENSG00000205277.5 | 1 |
| 1604 | | | |
| SEQ ID NO: | SPTTTLSPASMTSLGVGEESTTSR | ENSG00000205277.5 | 1 |
| 1605 | | | |
| SEQ ID NO: | SPTTTLSPASMTSLGVGEESTTSR | ENSG00000205277.5 | 1 |
| 1606 | | | |
| SEQ ID NO: | SPTTTLSPASMTSLGVGEESTTSR | ENSG00000205277.5 | 1 |
| 1607 | | | |
| SEQ ID NO: | SQAYADYIGFILTLNEGVK | ENSG00000119383.15 | 1 |
| 1608 | | | |
| SEQ ID NO: | SQMNCNLGTCQLQR | ENSG00000205277.5 | 1 |
| 1609 | | | |
| SEQ ID NO: | SRQELNTIASKPPR | ENSG00000169896.12 | 1 |
| 1610 | | | |
| SEQ ID NO: | SSHVTIDTLK | ENSG00000163975.7 | 1 |
| 1611 | | | |
| SEQ ID NO: | SSQNDSPGDASEGPEYLAIGNLD | ENSG00000145016.9 | 1 |
| 1612 | PRGR | | |
| SEQ ID NO: | STEYELQQLEQFKK | ENSG00000166825.9 | 1 |
| 1613 | | | |
| SEQ ID NO: | STSFNVQDLLPDHEYKFR | ENSG00000065534.14 | 1 |
| 1614 | | | |
| SEQ ID NO: | SVEQEVVQSQLNHCVNLYK | ENSG00000198947.10 | 1 |
| 1615 | | | |
| SEQ ID NO: | SVYTMPLANHR | ENSG00000090006.13 | 1 |
| 1616 | | | |
| SEQ ID NO: | SWAEDEKQKAETVQAALEEAQR | ENSG00000172037.9 | 1 |
| 1617 | | | |
| SEQ ID NO: | SWCSGHLHLRCPR | ENSG00000032444.11 | 1 |
| 1618 | | | |
| SEQ ID NO: | SYVDTGGVSR | ENSG00000184922.9 | 1 |
| 1619 | | | |
| SEQ ID NO: | SYVITGSWNPK | ENSG00000011454.12 | 1 |
| 1620 | | | |
| SEQ ID NO: | TAIWEDQNLR | ENSG00000205277.5 | 1 |
| 1621 | | | |
| SEQ ID NO: | TALLTAGDIYLLSTFR | ENSG00000169231.9 | 1 |
| 1622 | | | |
| SEQ ID NO: | TEALMDAQKEDFNSK | ENSG00000172037.9 | 1 |
| 1623 | | | |
| SEQ ID NO: | TEFCLHDGPPYANGDPHVGHAL | ENSG00000067704.8 | 1 |
| 1624 | NK | | |
| SEQ ID NO: | TESSGGWQNR | ENSG00000011028.9 | 1 |
| 1625 | | | |
| SEQ ID NO: | THIESSGHGVDTCLHVVLSSKVC | ENSG00000019144.12 | 1 |
| 1626 | R | | |
| SEQ ID NO: | TKVHAELADVLTEAVVDSILAIKK | ENSG00000146731.6 | 1 |
| 1627 | | | |
| SEQ ID NO: | TLEIALEQKKEECLK | ENSG00000082805.15 | 1 |
| 1628 | | | |
| SEQ ID NO: | TLNATGEEIIQQSSK | ENSG00000198947.10 | 1 |
| 1629 | | | |
| SEQ ID NO: | TLPSMVHR | ENSG00000101199.8 | 1 |
| 1630 | | | |
| SEQ ID NO: | TMNGDMR | ENSG00000120549.11 | 1 |
| 1631 | | | |
| SEQ ID NO: | TNHIGWVQEFLNEENR | ENSG00000184922.9 | 1 |
| 1632 | | | |
| SEQ ID NO: | TNIQLPACLR | ENSG00000213380.9 | 1 |
| 1633 | | | |
| SEQ ID NO: | TPDELQK | ENSG00000198947.10 | 1 |
| 1634 | | | |
| SEQ ID NO: | TPLERDDLHESVFR | ENSG00000151914.13 | 1 |
| 1635 | | | |
| SEQ ID NO: | TSGNQDEILVIR | ENSG00000106976.14 | 1 |
| 1636 | | | |
| SEQ ID NO: | TTLSPASSTSPGLQGESTAFQTHP | ENSG00000205277.5 | 1 |
| 1637 | ASTHTTPSPPSTATAPVEESTTYH | | |
| | R | | |
| SEQ ID NO: | TTLSPASSTSPGLQGESTAFQTHP | ENSG00000205277.5 | 1 |
| 1638 | ASTHTTPSPPSTATAPVEESTTYH | | |
| | R | | |
| SEQ ID NO: | TTLSPASSTSPGLQGESTAFQTHP | ENSG00000205277.5 | 1 |
| 1639 | ASTHTTPSPPSTATAPVEESTTYH | | |
| | R | | |
| SEQ ID NO: | TTQGLTALLLSLKK | ENSG00000136631.8 | 1 |
| 1640 | | | |
| SEQ ID NO: | TTQIINITMTK | ENSG00000137497.13 | 1 |
| 1641 | | | |
| SEQ ID NO: | TWVQQSETK | ENSG00000198947.10 | 1 |
| 1642 | | | |
| SEQ ID NO: | VAIGPSVLNAAR | ENSG00000067704.8 | 1 |
| 1643 | | | |
| SEQ ID NO: | VAYIPDEMAAQQNPLQQPR | ENSG00000136231.9 | 1 |
| 1644 | | | |
| SEQ ID NO: | VDSDMNDAYLGYAAAIILR | ENSG00000169896.12 | 1 |
| 1645 | | | |
| SEQ ID NO: | VEDAYILTCNVSLEYEK | ENSG00000146731.6 | 1 |
| 1646 | | | |
| SEQ ID NO: | VGAPMHDLLLWNNATVTTCHS | ENSG00000100714.11 | 1 |
| 1647 | K | | |
| SEQ ID NO: | VHLFDIITQYR | ENSG00000213380.9 | 1 |
| 1648 | | | |
| SEQ ID NO: | VIECFNVESR | ENSG00000104728.11 | 1 |
| 1649 | | | |
| SEQ ID NO: | VLGHFEKPLFLELCR | ENSG00000032444.11 | 1 |
| 1650 | | | |
| SEQ ID NO: | VLMDLQNQK | ENSG00000198947.10 | 1 |
| 1651 | | | |
| SEQ ID NO: | VLTTSPSR | ENSG00000019144.12 | 1 |
| 1652 | | | |
| SEQ ID NO: | VMLPPGAQHSDEK | ENSG00000130396.16 | 1 |
| 1653 | | | |
| SEQ ID NO: | VNFRPRYVTRYKTVTQLEWRCCP | ENSG00000132205.6 | 1 |
| 1654 | GFRGGDCQEGPK | | |
| SEQ ID NO: | VPDMAEIQSR | ENSG00000032444.11 | 1 |
| 1655 | | | |
| SEQ ID NO: | VQLLSQYDNEK | ENSG00000184922.9 | 1 |
| 1656 | | | |
| SEQ ID NO: | VSRASSPEGRHLPSPQLGTK | ENSG00000105559.7 | 1 |
| 1657 | | | |
| SEQ ID NO: | VTCTGYHQVR | ENSG00000133316.11 | 1 |
| 1658 | | | |
| SEQ ID NO: | VTEFDAAR | ENSG00000136631.8 | 1 |
| 1659 | | | |
| SEQ ID NO: | VVQEENQHMQMTIQALQDELR | ENSG00000082805.15 | 1 |
| 1660 | | | |
| SEQ ID NO: | VYLDLTPVK | ENSG00000169129.10 | 1 |
| 1661 | | | |
| SEQ ID NO: | WCATSDPEQHK | ENSG00000163975.7 | 1 |
| 1662 | | | |
| SEQ ID NO: | WFSIQNNQLVYQK | ENSG00000114331.8 | 1 |
| 1663 | | | |
| SEQ ID NO: | WIEFCQLLSER | ENSG00000198947.10 | 1 |
| 1664 | | | |
| SEQ ID NO: | WYQNPDYNFFNNYK | ENSG00000073849.10 | 1 |
| 1665 | | | |
| SEQ ID NO: | YADSLKPNIPYK | ENSG00000130396.16 | 1 |
| 1666 | | | |
| SEQ ID NO: | YENHSATAESSR | ENSG00000152894.10 | 1 |
| 1667 | | | |
| SEQ ID NO: | YLITATLTPER | ENSG00000132205.6 | 1 |
| 1668 | | | |
| SEQ ID NO: | YLQQPGCLLVGTNMDNR | ENSG00000184207.8 | 1 |
| 1669 | | | |
| SEQ ID NO: | YLRELSGSGLER | ENSG00000213380.9 | 1 |
| 1670 | | | |
| SEQ ID NO: | YLSASEYGSSVDGHPEVPETK | ENSG00000169129.10 | 1 |
| 1671 | | | |
| SEQ ID NO: | YNASSQQQR | ENSG00000165322.13 | 1 |
| 1672 | | | |
| SEQ ID NO: | YQETMSAIR | ENSG00000198947.10 | 1 |
| 1673 | | | |
| SEQ ID NO: | YSFWLTTIPEQSFQGSPSADTLK | ENSG00000134871.13 | 1 |
| 1674 | | | |
| SEQ ID NO: | YTKQGFGNLPICMAK | ENSG00000100714.11 | 1 |
| 1675 | | | |
| SEQ ID NO: | YVPAIAHLIHSLN | ENSG00000106066.9 | 1 |
| 1676 | | | |
| SEQ ID NO: | AAECLDVDECHRVPPPCDLGR | ENSG00000090006.13 | 0 |
| 1677 | | | |
| SEQ ID NO: | AEGGKRPAR | ENSG00000104450.8 | 0 |
| 1678 | | | |
| SEQ ID NO: | AEPVWTPPAPAPAAPPSTPAAP | ENSG00000115310.13 | 0 |
| 1679 | K | | |
| SEQ ID NO: | AFLCPLICHNGGVCVKPDR | ENSG00000090006.13 | 0 |
| 1680 | | | |
| SEQ ID NO: | AHLIHSLNPVR | ENSG00000106066.9 | 0 |
| 1681 | | | |
| SEQ ID NO: | AIAHLIHSLNPVR | ENSG00000106066.9 | 0 |
| 1682 | | | |
| SEQ ID NO: | AIWNVINW | ENSG00000112096.12 | 0 |
| 1683 | | | |
| SEQ ID NO: | AIWNVINWENV | ENSG00000112096.12 | 0 |
| 1684 | | | |
| SEQ ID NO: | ANGITMYAVGVGK | ENSG00000132561.9 | 0 |
| 1685 | | | |
| SEQ ID NO: | AQPVPFVPQVLGVMIGAGVAVV | ENSG00000032444.11 | 0 |
| 1686 | VTAVLILLVVRR | | |
| SEQ ID NO: | ARILTAAR | ENSG00000004139.9 | 0 |
| 1687 | | | |
| SEQ ID NO: | AVGPGAGGAGSAVPGGAGPCA | ENSG00000142453.7 | 0 |
| 1688 | TVSVFPGAR | | |
| SEQ ID NO: | AYDNFGVLGLDLWQVK | ENSG00000179218.9 | 0 |
| 1689 | | | |
| SEQ ID NO: | CVCPAGFR | ENSG00000090006.13 | 0 |
| 1690 | | | |
| SEQ ID NO: | CVHGPTGSR | ENSG00000090006.13 | 0 |
| 1691 | | | |
| SEQ ID NO: | CVPPRTSAGTFPGSQPQAPASPV | ENSG00000090006.13 | 0 |
| 1692 | LPAR | | |
| SEQ ID NO: | DHPSSHSAQPPR | ENSG00000138162.13 | 0 |
| 1693 | | | |
| SEQ ID NO: | DKERLQAMMTHLHVKSTEPK | ENSG00000114861.14 | 0 |
| 1694 | | | |
| SEQ ID NO: | DLDNAEEKADALNK | ENSG00000011454.12 | 0 |
| 1695 | | | |
| SEQ ID NO: | DLYSALIQFFQIFPEYK | ENSG00000106066.9 | 0 |
| 1696 | | | |
| SEQ ID NO: | DPASDKLLGPAGLTWERNLPGA | ENSG00000138162.13 | 0 |
| 1697 | GVGKEMAGVPPTLR | | |
| SEQ ID NO: | DSAVMDDSVVIPSHQVSTLAK | ENSG00000145362.12 | 0 |
| 1698 | | | |
| SEQ ID NO: | DSSTPYQEIAAVPSAGR | ENSG00000138162.13 | 0 |
| 1699 | | | |
| SEQ ID NO: | DWDSPYSHDLDT | ENSG00000105223.14 | 0 |
| 1700 | | | |
| SEQ ID NO: | DWDSPYSHDLDTS | ENSG00000105223.14 | 0 |
| 1701 | | | |
| SEQ ID NO: | EDLDQSPLVSSSDSPPRPQPAFK | ENSG00000115310.13 | 0 |
| 1702 | | | |
| SEQ ID NO: | EESREPAPASPAPA | ENSG00000113657.8 | 0 |
| 1703 | | | |
| SEQ ID NO: | ELSSKGVK | ENSG00000176890.11 | 0 |
| 1704 | | | |
| SEQ ID NO: | EMELRRQALEEERR | ENSG00000019144.12 | 0 |
| 1705 | | | |
| SEQ ID NO: | ENGTVPK | ENSG00000165322.13 | 0 |
| 1706 | | | |
| SEQ ID NO: | ENKEVVLQWFTENSK | ENSG00000166825.9 | 0 |
| 1707 | | | |
| SEQ ID NO: | EVAESPRPR | ENSG00000019144.12 | 0 |
| 1708 | | | |
| SEQ ID NO: | FILDNLK | ENSG00000151835.9 | 0 |
| 1709 | | | |
| SEQ ID NO: | FLEAVAEEKPHVKPYFSK | ENSG00000065534.14 | 0 |
| 1710 | | | |
| SEQ ID NO: | FPIEGGQKDPK | ENSG00000107957.12 | 0 |
| 1711 | | | |
| SEQ ID NO: | FSTEYELQQLEQFKKDNEETGFG | ENSG00000166825.9 | 0 |
| 1712 | SGTR | | |
| SEQ ID NO: | FWPAIDDGLR | ENSG00000105223.14 | 0 |
| 1713 | | | |
| SEQ ID NO: | FYIDFGGVKPMGSEPVPKSR | ENSG00000004864.9 | 0 |
| 1714 | | | |
| SEQ ID NO: | GADLIEEAASRIVDAVIEQVKAAG | ENSG00000170776.15 | 0 |
| 1715 | ALLTEGE | | |
| SEQ ID NO: | GADYAEPTWNLK | ENSG00000166825.9 | 0 |
| 1716 | | | |
| SEQ ID NO: | GDEEKDKGLQTSQDAR | ENSG00000179218.9 | 0 |
| 1717 | | | |
| SEQ ID NO: | GDILQTPQFQMR | ENSG00000137497.13 | 0 |
| 1718 | | | |
| SEQ ID NO: | GDNLPQYR | ENSG00000205277.5 | 0 |
| 1719 | | | |
| SEQ ID NO: | GNEAVASR | ENSG00000135052.12 | 0 |
| 1720 | | | |
| SEQ ID NO: | GPNKHTLTQIKDAVR | ENSG00000146731.6 | 0 |
| 1721 | | | |
| SEQ ID NO: | GQGPMFLDADFVAFTNHFK | ENSG00000198947.10 | 0 |
| 1722 | | | |
| SEQ ID NO: | GTATPELHTATDYR | ENSG00000170776.15 | 0 |
| 1723 | | | |
| SEQ ID NO: | GWAGDSGPQGRPGVFGLPGEK | ENSG00000134871.13 | 0 |
| 1724 | | | |
| SEQ ID NO: | GYLAPSGDLSLRR | ENSG00000090006.13 | 0 |
| 1725 | | | |
| SEQ ID NO: | HAEQQALR | ENSG00000142453.7 | 0 |
| 1726 | | | |
| SEQ ID NO: | IEDPSLLNSR | ENSG00000032444.11 | 0 |
| 1727 | | | |
| SEQ ID NO: | IFMEEVPGGSLSSLLRS | ENSG00000142733.10 | 0 |
| 1728 | | | |
| SEQ ID NO: | IFMEEVPGGSLSSLLRS | ENSG00000142733.10 | 0 |
| 1729 | | | |
| SEQ ID NO: | IIEVAPQVATQNVNPTPGAT | ENSG00000086475.10 | 0 |
| 1730 | | | |
| SEQ ID NO: | ILNSDQTTCR | ENSG00000132561.9 | 0 |
| 1731 | | | |
| SEQ ID NO: | ISCWGHSEPSMR | ENSG00000105223.14 | 0 |
| 1732 | | | |
| SEQ ID NO: | IVVHSVENMNFR | ENSG00000184922.9 | 0 |
| 1733 | | | |
| SEQ ID NO: | KAVAHMK | ENSG00000132561.9 | 0 |
| 1734 | | | |
| SEQ ID NO: | KDITAALAAER | ENSG00000106976.14 | 0 |
| 1735 | | | |
| SEQ ID NO: | KDNEETGFGSGTR | ENSG00000166825.9 | 0 |
| 1736 | | | |
| SEQ ID NO: | KHQGHFLLGTLSR | ENSG00000061938.12 | 0 |
| 1737 | | | |
| SEQ ID NO: | KIAEIQARR | ENSG00000152894.10 | 0 |
| 1738 | | | |
| SEQ ID NO: | KKEADMQQK | ENSG00000158560.10 | 0 |
| 1739 | | | |
| SEQ ID NO: | KLFGGPGSRR | ENSG00000110237.3 | 0 |
| 1740 | | | |
| SEQ ID NO: | KPAAGLSAAPVPTAPAAGAP | ENSG00000115310.13 | 0 |
| 1741 | | | |
| SEQ ID NO: | KSSTGSPTSPLNAEKLESEEDVSQ | ENSG00000065534.14 | 0 |
| 1742 | A | | |
| SEQ ID NO: | KVVATTQMQAADARK | ENSG00000166825.9 | 0 |
| 1743 | | | |
| SEQ ID NO: | LADSDQASKVQQQK | ENSG00000137497.13 | 0 |
| 1744 | | | |
| SEQ ID NO: | LAYVSCVR | ENSG00000032444.11 | 0 |
| 1745 | | | |
| SEQ ID NO: | LGIVQGIVGARNTSAASTAQLVE | ENSG00000172037.9 | 0 |
| 1746 | ATEELRREIG | | |
| SEQ ID NO: | LHYNELGAKVTERKQQ | ENSG00000198947.10 | 0 |
| 1747 | | | |
| SEQ ID NO: | LIEVGPSGAQFLGK | ENSG00000145362.12 | 0 |
| 1748 | | | |
| SEQ ID NO: | LKQTNLQWIK | ENSG00000198947.10 | 0 |
| 1749 | | | |
| SEQ ID NO: | LKTVFYR | ENSG00000104728.11 | 0 |
| 1750 | | | |
| SEQ ID NO: | LLISCWGHSEPSMR | ENSG00000105223.14 | 0 |
| 1751 | | | |
| SEQ ID NO: | LMFDRSEVYGPMK | ENSG00000166825.9 | 0 |
| 1752 | | | |
| SEQ ID NO: | LMLEWQFQK | ENSG00000130396.16 | 0 |
| 1753 | | | |
| SEQ ID NO: | LPAAPPVAPER | ENSG00000115310.13 | 0 |
| 1754 | | | |
| SEQ ID NO: | LPPVLGTESDATVK | ENSG00000065534.14 | 0 |
| 1755 | | | |
| SEQ ID NO: | LPQEPGR | ENSG00000135052.12 | 0 |
| 1756 | | | |
| SEQ ID NO: | LQGQDSERVRAWQR | ENSG00000165912.11 | 0 |
| 1757 | | | |
| SEQ ID NO: | LSRKGGHER | ENSG00000019144.12 | 0 |
| 1758 | | | |
| SEQ ID NO: | LTELENELNTK | ENSG00000130396.16 | 0 |
| 1759 | | | |
| SEQ ID NO: | LTGKAEGGK | ENSG00000104450.8 | 0 |
| 1760 | | | |
| SEQ ID NO: | LWEAVKRR | ENSG00000061938.12 | 0 |
| 1761 | | | |
| SEQ ID NO: | LWHLDPDTEYEIR | ENSG00000152894.10 | 0 |
| 1762 | | | |
| SEQ ID NO: | LYGVVLTPPMK | ENSG00000061938.12 | 0 |
| 1763 | | | |
| SEQ ID NO: | MELEEVTRLLNLKDK | ENSG00000104450.8 | 0 |
| 1764 | | | |
| SEQ ID NO: | MIEDSGPGMKVLL | ENSG00000136631.8 | 0 |
| 1765 | | | |
| SEQ ID NO: | MPVAGSELPR | ENSG00000176890.11 | 0 |
| 1766 | | | |
| SEQ ID NO: | NFVLVLSPGALDK | ENSG00000004139.9 | 0 |
| 1767 | | | |
| SEQ ID NO: | NIMFGPDICGPGTK | ENSG00000179218.9 | 0 |
| 1768 | | | |
| SEQ ID NO: | NITIIVEDPIAESCNDKAKLRGPL | ENSG00000145016.9 | 0 |
| 1769 | | | |
| SEQ ID NO: | NPKAEVARAQAALAVNISAARG | ENSG00000146731.6 | 0 |
| 1770 | LQDVLRTNLGPK | | |
| SEQ ID NO: | NQVTQLK | ENSG00000100714.11 | 0 |
| 1771 | | | |
| SEQ ID NO: | NVINWENVTER | ENSG00000112096.12 | 0 |
| 1772 | | | |
| SEQ ID NO: | PGHYDILYK | ENSG00000167770.7 | 0 |
| 1773 | | | |
| SEQ ID NO: | PGSPGLPGMPGR | ENSG00000134871.13 | 0 |
| 1774 | | | |
| SEQ ID NO: | PLEEGLNKAIHYFR | ENSG00000115652.10 | 0 |
| 1775 | | | |
| SEQ ID NO: | PLSTRVPR | ENSG00000132561.9 | 0 |
| 1776 | | | |
| SEQ ID NO: | PSAGFLPTHR | ENSG00000090006.13 | 0 |
| 1777 | | | |
| SEQ ID NO: | PSGPQPQADLQALLQSGAQVR | ENSG00000105223.14 | 0 |
| 1778 | | | |
| SEQ ID NO: | PSSSGSTGTKLSPARSTTSGLVGE | ENSG00000205277.5 | 0 |
| 1779 | STPSR | | |
| SEQ ID NO: | PSSSGSTGTKLSPARSTTSGLVGE | ENSG00000205277.5 | 0 |
| 1780 | STPSR | | |
| SEQ ID NO: | QGYILNSDQTTCR | ENSG00000132561.9 | 0 |
| 1781 | | | |
| SEQ ID NO: | QVFEELWK | ENSG00000059691.7 | 0 |
| 1782 | | | |
| SEQ ID NO: | QVKPKTVSEEERKV | ENSG00000065534.14 | 0 |
| 1783 | | | |
| SEQ ID NO: | QYISKMIEDSGPGMK | ENSG00000136631.8 | 0 |
| 1784 | | | |
| SEQ ID NO: | QYMPWEAALSSLSYFK | ENSG00000166825.9 | 0 |
| 1785 | | | |
| SEQ ID NO: | RADVLAFPSSGFTDLAEIVSR | ENSG00000032444.11 | 0 |
| 1786 | | | |
| SEQ ID NO: | RAVAAQPGRKR | ENSG00000172977.8 | 0 |
| 1787 | | | |
| SEQ ID NO: | RDEGSQDQTGSLSRARPSSR | ENSG00000110237.3 | 0 |
| 1788 | | | |
| SEQ ID NO: | RDPEVGKDELSKPSSDAESR | ENSG00000138162.13 | 0 |
| 1789 | | | |
| SEQ ID NO: | RMQSSADLIIQEFMDLRTR | ENSG00000151914.13 | 0 |
| 1790 | | | |
| SEQ ID NO: | SASFEPFSNK | ENSG00000179218.9 | 0 |
| 1791 | | | |
| SEQ ID NO: | SDQIGLPDFNAGAMENWGLVT | ENSG00000166825.9 | 0 |
| 1792 | YR | | |
| SEQ ID NO: | SFACQCPEGHVLR | ENSG00000132561.9 | 0 |
| 1793 | | | |
| SEQ ID NO: | SFLKLILQVEKWQEECEEGEGRTI | ENSG00000152894.10 | 0 |
| 1794 | IHCLNGGGR | | |
| SEQ ID NO: | SFPAAQIPIAVEEPGSSSRESVSK | ENSG00000138162.13 | 0 |
| 1795 | AGMPVSADAAK | | |
| SEQ ID NO: | SFTQGEGAR | ENSG00000132561.9 | 0 |
| 1796 | | | |
| SEQ ID NO: | SFTQGEGARPLSTR | ENSG00000132561.9 | 0 |
| 1797 | | | |
| SEQ ID NO: | SHTLSHASYLR | ENSG00000145362.12 | 0 |
| 1798 | | | |
| SEQ ID NO: | SLEQLQK | ENSG00000137497.13 | 0 |
| 1799 | | | |
| SEQ ID NO: | SPHTTLSPAGSTTR | ENSG00000205277.5 | 0 |
| 1800 | | | |
| SEQ ID NO: | SPHTTLSPAGSTTR | ENSG00000205277.5 | 0 |
| 1801 | | | |
| SEQ ID NO: | SPHTTLSPAGSTTR | ENSG00000205277.5 | 0 |
| 1802 | | | |
| SEQ ID NO: | SPHTTLSPAGSTTR | ENSG00000205277.5 | 0 |
| 1803 | | | |
| SEQ ID NO: | SQTLIDLNR | ENSG00000059691.7 | 0 |
| 1804 | | | |
| SEQ ID NO: | SSHNFQLESVNK | ENSG00000135052.12 | 0 |
| 1805 | | | |
| SEQ ID NO: | STCAPSPQR | ENSG00000138162.13 | 0 |
| 1806 | | | |
| SEQ ID NO: | STTFYSSPR | ENSG00000205277.5 | 0 |
| 1807 | | | |
| SEQ ID NO: | STTFYSSPR | ENSG00000205277.5 | 0 |
| 1808 | | | |
| SEQ ID NO: | STTFYSSPR | ENSG00000205277.5 | 0 |
| 1809 | | | |
| SEQ ID NO: | STTFYSSPR | ENSG00000205277.5 | 0 |
| 1810 | | | |
| SEQ ID NO: | STTFYSSPR | ENSG00000205277.5 | 0 |
| 1811 | | | |
| SEQ ID NO: | STTFYSSPR | ENSG00000205277.5 | 0 |
| 1812 | | | |
| SEQ ID NO: | STTFYSSPR | ENSG00000205277.5 | 0 |
| 1813 | | | |
| SEQ ID NO: | STTFYSSPR | ENSG00000205277.5 | 0 |
| 1814 | | | |
| SEQ ID NO: | STTFYSSPR | ENSG00000205277.5 | 0 |
| 1815 | | | |
| SEQ ID NO: | TATAGAISELTESRLR | ENSG00000128487.12 | 0 |
| 1816 | | | |
| SEQ ID NO: | TEVAIGPSVLNAAR | ENSG00000067704.8 | 0 |
| 1817 | | | |
| SEQ ID NO: | TGDPQETLRR | ENSG00000137497.13 | 0 |
| 1818 | | | |
| SEQ ID NO: | THLSLSHNPEQKGVPTGFILPIRDI | ENSG00000100714.11 | 0 |
| 1819 | R | | |
| SEQ ID NO: | THTATGIR | ENSG00000169896.12 | 0 |
| 1820 | | | |
| SEQ ID NO: | TLATQLNQQK | ENSG00000151914.13 | 0 |
| 1821 | | | |
| SEQ ID NO: | TPVPEKVPPPKPATPDF | ENSG00000065534.14 | 0 |
| 1822 | | | |
| SEQ ID NO: | TVQQPTVQHR | ENSG00000132561.9 | 0 |
| 1823 | | | |
| SEQ ID NO: | TYQGFWNPPLAPR | ENSG00000152894.10 | 0 |
| 1824 | | | |
| SEQ ID NO: | VLCGDAGLLRGLADGLVQAGVG | ENSG00000142733.10 | 0 |
| 1825 | TEALLTPLVGRLARL | | |
| SEQ ID NO: | VLCGDAGLLRGLADGLVQAGVG | ENSG00000142733.10 | 0 |
| 1826 | TEALLTPLVGRLARL | | |
| SEQ ID NO: | VNYDEENWRK | ENSG00000166825.9 | 0 |
| 1827 | | | |
| SEQ ID NO: | VPEGFTCR | ENSG00000090006.13 | 0 |
| 1828 | | | |
| SEQ ID NO: | WSELRKKSLNIR | ENSG00000198947.10 | 0 |
| 1829 | | | |
| SEQ ID NO: | WSSRGSGGWGVYRSPSFGAGE | ENSG00000110237.3 | 0 |
| 1830 | GLLR | | |
| SEQ ID NO: | WYQPSFHGVDLSALR | ENSG00000142453.7 | 0 |
| 1831 | | | |
| SEQ ID NO: | YCNPGDVCYYASR | ENSG00000134871.13 | 0 |
| 1832 | | | |
| SEQ ID NO: | YGNLGHVNIGAIQEPLAFILPK | ENSG00000213380.9 | 0 |
| 1833 | | | |
| SEQ ID NO: | YITISGNR | ENSG00000151914.13 | 0 |
| 1834 | | | |
| SEQ ID NO: | YLSYTLNPDLIRK | ENSG00000166825.9 | 0 |
| 1835 | | | |
| SEQ ID NO: | YMVTER | ENSG00000105223.14 | 0 |
| 1836 | | | |

[0182] To examine possible functions of somatic promoters on cancer development, we focused on RASA3, a RAS GTPase-activating protein required for G_{αi}-induced inhibition of mitogen-activated protein kinases. In both GCs (50%) and GC lines, we observed gain of promoter activity at an intronic region 127 kb downstream apart from the canonical RASA3 TSS (FIG. 3c, top, FIG. 10). RNA-seq and 5′ RACE analysis confirmed expression of this shorter RASA3 isoform (FIG. 3c, bottom), and expression of this shorter RASA3 isoform was also observed in TCGA RNA-seq data (FIG. 3c). Compared to the canonical full-length RASA3 protein (CanT), the shorter 31 kDa RASA3 somatic isoform (SomT) is predicted to lack the N-terminal RasGAP domain (FIG. 3d). Consistent with these predictions, transection of RASA3 CanT into GES1 normal gastric epithelial cells induced lower levels of active GTP-bound RAS compared to either empty vector or RASA3 SomT transfected cells, indicating that RASA3 CanT has higher RASGAP activity (FIG. 13).

[0183] To address functions of RASA3 SomT, we transfected the RASA3 CanT and SomT isoforms into SNU1967 GC cells. Compared to untransfected cells, transfection of RASA3 SomT into SNU1967 cells significantly stimulated migration (P<0.01) and invasion (P<0.01) while RASA3 CanT significantly suppressed invasion (P<0.001) (FIG. 3E, FIG. 13). Similarly, transfection of RASA3 SomT into GES1 cells significantly stimulated migration (p<0.01, FIG. 3e) and invasion (P<0.01, FIG. 13) while RASA3 CanT did not. When tested on KRAS mutated AGS GC cells that are innately highly migratory, expression of RASA3 CanT potently suppressed migration while RASA3 SomT exhibited significantly less attenuation (P<0.01, FIG. 13). These results suggest that tumor-specific use of RASA3 SomT is likely to increase GC cell migration and invasion. Notably, RASA3 CanT and SomT transfections did not alter SNU1967, GES1 or AGS cellular proliferation rates (FIG. 13). To confirm that these observations are not due to non-physiological in vitro expression levels, we then examined NCC24 GC cells, which normally express high endogenous levels of RASA3 SomT and minimal RASA3 CanT (FIG. 13). Silencing of endogenous RASA3 SomT using two independent siRNA constructs significantly inhibited NCC24 migration and invasion (P<0.01-0.001) (FIG. 13), consistent with RASA3 SomT playing a role in promoting cancer migration and invasion.

[0184] In an earlier study, we reported a transcript isoform of the MET receptor tyrosine kinase, driven by an internal alternative promoter, which has been independently confirmed in other cancer types. However, functional implications of this MET variant remain unclear. RNA-seq and 5′ RACE analysis confirmed transcript expression of this shorter isoform, predicted to harbor a truncated SEMA domain (FIG. 14). To assess functional differences between wild type (WT) and variant (Var) MET, we performed transient transfections of MET(WT) and MET(Var) into HEK293 cells. In both untreated and HGF-treated conditions, MET-Var transfected cells exhibited significantly higher levels of p-Gab1 (Y627), a key mediator of MET signaling (e.g. 2.48-3.95 fold comparing MET-Var vs MET-WT, P=0.003 (untreated), P<0.05 (T15 and T30). (66) In addition, in HGF-untreated samples, cells transfected with MET-Var also exhibited higher p-ERK1/2 levels (2.74 fold) and also higher p-STAT3 (Y705)(67-70) levels (1.80 fold) compared to MET-WT (P=0.023 and P=0.026 for p-ERK and p-STAT3 (Y705) respectively). These results suggest that expression of the MET Var isoform may promote MET-downstream signaling kinetics in a manner important for GC tumorigenesis.

[0185] Somatic Promoters Correlate with Tumor Immunity

[0186] Cancer immunoediting is a process where developing tumors sculpt their immunogenic and antigenic profile to evade host immune surveillance. Mechanisms of cancer immunoediting are diverse, including upregulation of immune checkpoint inhibitors such as PD-L1. To explore potential contributions of somatic promoters to tumor immunity, we identified somatic promoter-associated N-terminal peptides with high predicted affinity binding to GC specific MHC Class I HLA alleles (Table 8 and 9), which are required for antigen presentation to CD8+ cytotoxic T cells (IC50≤50 nM, FIG. 4a). Analysis of recurrent somatic promoter-associated peptides using the NetMHCpan-2.8 algorithm revealed a significant enrichment in high-affinity MHC I binding compared to multiple control peptide populations, including canonical GC peptides (average 36% vs 24%; P<0.01), randomly selected peptides (P<0.001), and C-terminal peptides (P<0.01) (FIG. 4B shows HLA-A, B, and C combined, FIG. 15A depicts data for HLA-A only). The majority of high affinity somatic promoter-associated peptides corresponded to situations where the somatic transcript lacking the N-terminal peptide is overexpressed in tumors relative to normal tissues (78% lost; 76/97 high-affinity peptides, FIG. 4C). Notably, because transcripts driven by the N-terminal lacking somatic TSSs are also overexpressed in tumors to a significantly greater degree than transcripts driven by the canonical TSS (P<0.05, Wilcoxon one sided test) (FIG. 12), such a scenario would be predicted to result in relative depletion of these N-terminal immunogenic peptides in tumors. Interestingly, an analogous N-terminal analysis using RNA-seq data alone (in the absence of epigenomic data) revealed that epigenome-guided N-terminal peptides exhibited significantly higher predicted immunogenicity scores compared to RNA-seq-only identified peptides (36.10% vs 27% for MHC presentation, P=0.02, Fisher Test), suggesting that epigenome-guided promoter identification can provide complementary value to RNA-seq-only guided analyses (FIG. 15).

TABLE 8
HLA prediction of GC samples

| Sample | A1 | A2 | B1 | B2 | C1 | C |
|---|---|---|---|---|---|---|
| 2000639 | A*33:03 | A*24:02 | B*58:01 | B*40:01 | C*03:02 | C*03:67 |
| 2000721 | A*11:01 | A*11:01 | B*46:01 | B*15:01 | C*01:02 | C*04:01 |
| 2000986 | A*24:02 | A*11:01 | B*40:01 | B*38:02 | C*07:02 | C*15:02 |
| 980437 | A*33:03 | A*02:07 | B*40:01 | B*39:01 | C*07:02 | C*04:01 |
| 990068 | A*02:03 | A*11:01 | B*51:01 | B*55:02 | C*08:01 | C*14:02 |
| 2000085 | A*24:07 | A*34:01 | B*15:21 | B*15:21 | C*04:03 | C*04:03 |
| 980401 | A*33:03 | A*11:01 | B*58:01 | B*40:01 | C*03:02 | C*07:02 |
| 980447 | A*11:01 | A*11:01 | B*38:02 | B*27:04 | C*12:02 | C*07:02 |
| 2001206 | A*02:07 | A*24:02 | B*46:01 | B*40:06 | C*01:02 | C*08:01 |
| 980436 | A*02:03 | A*02:07 | B*46:01 | B*46:01 | C*01:02 | C*01:02 |
| 980417 | A*33:03 | A*11:01 | B*58:01 | B*46:01 | C*03:02 | C*01:02 |
| 980319 | A*33:03 | A*11:02 | B*58:01 | B*27:04 | C*03:02 | C*12:02 |
| 20021007 | A*24:10 | A*24:02 | B*15:27 | B*40:01 | C*03:04 | C*04:01 |

TABLE 9
Recurrent N terminal sequences with high affinity to MHC Class I

| SEQ ID NO. | Gene | N terminal sequence | High Affinity HLA |
|---|---|---|---|
| SEQ ID NO: 1847 | ENSG00000007171.12 | MACPWKFLFKTKFHQYA | A*02:03, A*02:07, A*11:01, |
| | | MNGEKDINNNVEKAPCAT | A*11:02, A*24:10, A*34:01, |
| | | SSPVTQDDLQYHNLSKQQ | B*15:01, B*15:21, B*15:27, |
| | | NESPQPLVETGKKSPESLVK | B*27:04, B*39:01, B*40:01, |
| | | LDATPLSSPRHVRIKNWGS | B*46:01, B*58:01, C*03:02, |
| | | GMTFQDTLHHKAKGILTCR | C*12:02 |
| | | SKSCLGSIMTPKSLTRGPRD | |
| | | KPTPPDELLPQAIEFVNQYY | |
| | | GSFKEAKIEEHLARVEAVTK | |
| | | EIETTGTYQLTGDELIFATK | |
| | | QAWRNAPRCIGRIQWSNL | |
| | | QVFDARSCSTARE | |
| SEQ ID NO: 1848 | ENSG00000011028.9 | MGPGRPAPAPWPRHLLRC | A*02:03, A*11:01, A*11:02, |
| | | VLLLGCLHLGRPGAPGDAA | A*24:02, A*24:07, A*24:10, |
| | | LPEPNVFLIFSHGLQGCLEA | A*33:03, B*15:01, B*15:27, |
| | | QGGQVRVTPACNTSLPAQ | B*38:02, B*39:01, B*40:01, |
| | | RWKWVSRNRLFNLGTMQ | B*40:06, B*51:01, B*58:01, |
| | | CLGTGWPGTNTTASLGMY | C*03:02, C*03:04, C*12:02, |
| | | ECDREALNLRWHCRTLGD | C*14:02 |
| | | QLSLLLGARTSNISKPGTLE | |
| | | RGDQTRSGQWRIYGSEED | |
| | | LCALPYHEVYTIQGNSHGK | |
| | | PCTIPFKYDNQWFHGCTST | |
| | | GREDGHLWCATTQDYGK | |
| | | DERWGFCPIKSNDCETFW | |
| | | DKDQLTDSCYQFNFQSTLS | |
| | | WREAWASCEQQGADLLSI | |
| | | TEIHEQTYINGLLTGYSSTL | |
| | | WIGLNDLDTSGGWQWSD | |
| | | NSPLKYLNWESDQPDNPS | |
| | | EENCGVIRTESSGGWQNR | |
| | | DCSIALPYVCKKKPNATAEP | |
| | | TPPDRWANVKVECEPSW | |
| | | QPFQGHCYRLQAEKRSW | |
| | | QESKKACLRGGGDLVSIHS | |
| | | MAELEFITKQIKQEVEELWI | |
| | | GLNDLKLQMNFEWSDGSL | |
| | | VSFTHWHPFEPNNFRDSLE | |
| | | DCVTIWGPEGRWNDSPC | |
| | | NQSLPSICKKAGQLSQGAA | |
| | | EEDHGCRKGWTWHSPSC | |
| | | YWLGEDQVTYSEARRLCT | |
| | | DHGSQLVTITNREEQAFVS | |
| | | SLIYNWEGEYFWTALQDL | |
| | | NSTGSFFWLSGDEVMYTH | |
| | | WNRDQPGYSRGGCVALA | |
| | | TGSAMGLWEVKNCTSFRA | |
| | | RYICRQSLGTPVTPELPGPD | |
| | | PTPSLTGSCPQGWASDTKL | |
| | | RYCYKVFSSERLQDKKSWV | |
| | | QAQGACQELGAQLLSLASY | |
| | | EEEHFVANMLNKIFGESEP | |
| | | EIHEQHWFWIGLNRRDPR | |
| | | GGQSWRWSDGVGFSYHN | |
| | | FDRSRHDDDDIRGCAVLDL | |
| | | ASLQWVAMQCDTQLDWI | |
| | | CKIPRGTDVREPDDSPQGR | |
| | | REWLRFQEAEYKFFEHHST | |
| | | WAQAQRICTWFQAELTSV | |
| | | HSQAELDFLSHNLQKFSRA | |
| | | QEQHWWIGLHTSESDGRF | |
| | | RWTDGSIINFISWAPGKPR | |
| | | PVGKDKKCVYMTASRED | |
| | | WGDQRCLTALPYICKRSNV | |
| | | TKETQPPDLPTTALGGCPS | |
| | | DWIQFLNKCFQVQGQEPQ | |
| | | SRVKWSEAQFSCEQQEAQ | |
| | | LVTITNPLEQAFITASLPNV | |
| | | TFDLWIGLHASQRDFQWV | |
| | | EQEPLMYANWAPGEPSG | |
| | | PSPAPSGNKPTSCAVVLHS | |
| | | PSAHFTGRWDDRSCTEET | |
| | | HGFICQKGTDPSLSPSPAAL | |
| | | PPAPGTELSYLNGTFRLLQK | |
| | | PLRWHDALLLCESRNASLA | |
| | | YVPDPYTQAFLTQAARGLR | |
| | | TPLWIGLAGEEGSRRYSW | |
| | | VSEEPLNYVGWQDGEPQ | |
| | | QPGGCTYVDVDGAWRTT | |
| | | SCDTKLQGAVCGVSSGPPP | |
| | | PRRISYHGSCPQGLADSA | |
| | | WIPEREHCYSFHMELLLGH | |
| | | KEARQRCQRAGGAVLSILD | |
| | | EMENVFVWEHLQSYEGQS | |
| | | RGAWLGMNFNPKGGTLV | |
| | | WQDNTAVNYSNWGPPGL | |
| | | GPSMLSHNSCYWIQSNSG | |
| | | LWRPGACTNITMGVVCKL | |
| | | PRAEQSSFSPSALPENPAAL | |
| | | VVVLMAVLLLLALLTAALIL | |
| | | YRRRQSIERGAFEGARYSR | |
| | | SSSSPTEATEKNILVSDME | |
| | | MNEQQE | |
| SEQ ID NO: 1849 | ENSG00000020256.15 | MNASSEGESFAGSVQIPG | A*02:03, B*15:01, C*03:02, |
| | | GTTVLVELTPDIHICGICKQ | C*03:04 |
| | | QFNNLDAFVAHKQSGCQL | |
| | | TGTSAAAPSTVQFVSEETV | |
| | | PATQTQTTTRTITSETQTIT | |
| | | VSAPEFVFEHGYQTY | |
| SEQ ID NO: 1850 | ENSG00000032389.8 | MEDDAPVIYGLEFQARALT | A*02:03, A*24:07, A*24:10, |
| | | PQTAETDAIRFLVGTQSLKY | A*33:03, B*15:01, B*15:21, |
| | | DNQIHIIDFDDENNIINKNV | B*15:27, B*38:02, B*39:01, |
| | | LLHQAGEIWHISASPADRG | B*40:01, B*40:06, B*46:01, |
| | | VLTTCYNRRDIIESFGILPVA | B*51:01, B*55:02, B*58:01, |
| | | QSPTIVFVNTLHQVFFRGQ | C*01:02, C*03:02, C*03:04, |
| | | VAASDSKVLTCAAVWR | C*03:67, C*04:01, C*08:01, |
| | | | C*12:02, C*14:02, C*15:02 |
| SEQ ID NO: 1851 | ENSG00000037042.8 | MLEAILGGGGLPVEGRGST | A*02:03, A*11:01, A*11:02, |
| | | EFEAFRLILFGSEDSVLPSPL | A*24:02, A*24:07, A*24:10, |
| | | LYKMAHMGSDGGVLPVH | B*40:01, B*40:06, B*51:01, |
| | | YATILFSL | C*01:02, C*04:03, C*08:01, |
| | | | C*14:02 |
| SEQ ID NO: 1852 | ENSG00000053747.11 | MAAAARPRGRALGPVLPP | A*02:03, A*11:01, A*11:02, |
| | | TPLLLLVLRVLPACGATARD | A*24:02, A*24:07, A*24:10, |
| | | PGAAAGLSLHPTYFNLAEA | A*33:03, B*15:01, B*39:01, |
| | | ARIWATATCGERGPGEGR | B*40:01, B*55:02, B*58:01, |
| | | PQPELYCKLVGGPTAPGSG | C*03:02, C*03:04, C*03:67, |
| | | HTIQGQFCDYCNSEDPRKA | C*07:02, C*12:02, C*14:02, |
| | | HPVTNAIDGSERWWQSPP | C*15:02 |
| | | LSSGTQYNRVNLTLDLGQL | |
| | | FHVAYILIKFANSPRPDLWV | |
| | | LERSVDFGSTYSPWQYFAH | |
| | | SKVDCLKEFGREANMAVT | |
| | | RDDDVLCVTEYSRIVPLEN | |
| | | GEVVVSLINGRPGAKNFTF | |
| | | SHTLREFTKATNIRLRFLRT | |
| | | NTLLGHLISKAQRDPTVTR | |
| | | RYYYSIKDISIGGQCVCNGH | |
| | | AEVCNINNPEKLFRCECQH | |
| | | HTCGETCDRCCTGYNQRR | |
| | | WRPAAWEQSHECEACNC | |
| | | HGHASNCYYDPDVERQQA | |
| | | SLNTQGIYAGGGVCINCQH | |
| | | NTAGVNCEQCAKGYYRPY | |
| | | GVPVDAPDGCIPCSCDPEH | |
| | | ADGCEQGSGRCHCKPNFH | |
| | | GDNCEKCAIGYYNFPFCLRI | |
| | | PIFPVSTPSSEDPVAGDIKG | |
| | | CDCNLEGVLPEICDAHGRC | |
| | | LCRPGVEGPRCDTCRSGFY | |
| | | SFPICQACWCSALGSYQM | |
| | | PCSSVTGQCECRPGVTGQ | |
| | | RCDRCLSGAYDFPHCQGSS | |
| | | SACDPAGTINSNLGYCQCK | |
| | | LHVEGPTCSRCKLLYWNLD | |
| | | KENPSGCSECKCHKAGTVS | |
| | | GTGECRQGDGDCHCKSHV | |
| | | GGDSCDTCEDGYFALEKSN | |
| | | YFGCQGCQCDIGGALSSM | |
| | | CSGPSGVCQCREHVVGKV | |
| | | CQRPENNYYFPDLHHMKY | |
| | | EIEDGSTPNGRDLRFGFDP | |
| | | LAFPEFSWRGYAQMTSVQ | |
| | | NDVRITLNVGKSSGSLFRVI | |
| | | LRYVNPGTEAVSGHITIYPS | |
| | | WGAAQSKEIIFLPSKEPAFV | |
| | | TVPGNGFADPFSITPGIWV | |
| | | ACIKAEGVLLDYLVLLPRDY | |
| | | YEASVLQLPVTEPCAYAGP | |
| | | PQENCLLYQHLPVTRFPCT | |
| | | LACEARHFLLDGEPRPVAV | |
| | | RQPTPAHPVMVDLSGREV | |
| | | ELHLRLRIPQVGHYVVVVE | |
| | | YSTEAAQLFVVDVNVKSSG | |
| | | SVLAGQVNIYSCNYSVLCR | |
| | | SAVIDHMSRIAMYELLADA | |
| | | DIQLKGHMARFLLHQVCII | |
| | | PIEEFSAEYVRPQVHCIASY | |
| | | GRFVNQSATCVSLAHETPP | |
| | | TALILDVLSGRPFPHLPQQS | |
| | | SPSVDVLPGVTLKAPQNQ | |
| | | VTLRGRVPHLGRYVFVIHF | |
| | | YQAAHPTFPAQVSVDGG | |
| | | WPRAGSFHASFCPHVLGC | |
| | | RDQVIAEGQIEFDISEPEVA | |
| | | ATVKVPEGKSLVLVRVLVV | |
| | | PAENYDYQILHKKSMDKSL | |
| | | EFITNCGKNSFYLDPQTASR | |
| | | FCKNSARSLVAFYHKGALP | |
| | | CECHPTGATGPHCSPEGG | |
| | | QCPCQPNVIGRQCTRCAT | |
| | | GHYGFPRCKPCSCGRRLCE | |
| | | EMTGQCRCPPRTVRPQCE | |
| | | VCETHSFSFHPMAGCEGC | |
| | | NCSRRGTIEAAMPECDRDS | |
| | | GQCRCKPRITGRQCDRCAS | |
| | | GFYRFPECVPCNCNRDGTE | |
| | | PGVCDPGTGACLCKENVE | |
| | | GTECNVCREGSFHLDPANL | |
| | | KGCTSCFCFGVNNQCHSS | |
| | | HKRRTKFVDMLGWHLETA | |
| | | DRVDIPVSFNPGSNSMVA | |
| | | DLQELPATIHSASWVAPTS | |
| | | YLGDKVSSYGGYLTYQAKS | |
| | | FGLPGDMVLLEKKPDVQLT | |
| | | GQHMSIIYEETNTPRPDRL | |
| | | HHGRVHVVEGNFRHASSR | |
| | | APVSREELMTVLSRLADVRI | |
| | | QGLYFTETQRLTLSEVGLEE | |
| | | ASDTGSGRIALAVEICACPP | |
| | | AYAGDSC | |
| SEQ ID NO: 1853 | ENSG00000059145.14 | MPSVSKAAAAALSGSPPQ | A*02:03, A*24:10, A*33:03, |
| | | TEKPTHYRYLKEFRTEQCPL | B*15:01, B*39:01, B*40:01, |
| | | FSQHKCAQHRPFTCFHWH | B*58:01, C*03:02, C*03:04, |
| | | FLNQRRRRPLRRRDGTFNY | C*15:02 |
| | | SPDVYCSKYNEATGVCPDG | |
| | | DECPYLHRTTGDTERKYHL | |
| | | RYYKTGTCIHETDARGHCV | |
| | | KNGLHCAFAHGPLDLRPPV | |
| | | CDVRELQAQEALQNGQLG | |
| | | GGEGVPDLQPGVLASQA | |
| | | MIEKILSEDPRWQDANFVL | |
| | | GSYKTEQCPKPPRLCRQGY | |
| | | ACPHYHNSRDRRRNPRRF | |
| | | QYRSTPCPSVKHGDEWGE | |
| | | PSRCDGGDGCQYCHSRTE | |
| | | QQFHPESTKCNDMRQTGY | |
| | | CPRGPFCAFAHVEKSLGM | |
| | | VNEWGCHDLHLTSPSSTG | |
| | | SGQPGNAKRRDSPAEGGP | |
| | | RGSEQDSKQNHLAVFAAV | |
| | | HPPAPSVSSSVASSLASSAG | |
| | | SGSSSPTALPAPPARALPLG | |
| | | PASSTVEAVLGSALDLHLS | |
| | | NVNIASLEKDLEEQDGHDL | |
| | | GAAGPRSLAGSAPVAIPGS | |
| | | LPRAPSLHSPSSASTSPLGS | |
| | | LSQPLPGPVGSSA | |
| SEQ ID NO: 1854 | ENSG00000060656.15 | MARAQALVLALTFQLCAPE | A*02:03, A*11:01, A*11:02, |
| | | TETPAAGCTFEEASDPAVP | A*24:02, A*24:10, A*33:03, |
| | | CEYSQAQYDDFQWEQVRI | A*34:01, B*15:01, B*15:27, |
| | | HPGTRAPADLPHGSYLMV | B*38:02, B*39:01, B*40:01, |
| | | NTSQHAPGQRAHVIFQSLS | B*55:02, B*58:01, C*03:02, |
| | | ENDTHCVQFSYFLYSRDGH | C*03:04, C*07:02, C*12:02, |
| | | SPGTLGVYVRVNGGPLGS | C*14:02, C*15:02 |
| | | AVWNMTGSHGRQWHQA | |
| | | ELAVSTFWPNEYQVLFEALI | |
| | | SPDRRGYMGLDDILLLSYP | |
| | | CAKAPHFSRLGDVEVNAG | |
| | | QNASFQCMAAGRAAEAE | |
| | | RFLLQRQSGALVPAAGVR | |
| | | HISHRRFLATEPLAAVSRAE | |
| | | QDLYRCVSQAPRGAGVSN | |
| | | FAELIVKEPPTPIAPPQLLRA | |
| | | GPTYLIIQLNTNSIIGDGPIV | |
| | | RKEIEYRMARGPWAEVHA | |
| | | VSLQTYKLWHLDPDTEYEI | |
| | | SVLLTRPGDGGTGRPGPPL | |
| | | ISRTKCAEPMRAPKGLAFA | |
| | | EIQARQLTLQWEPLGYNVT | |
| | | RCHTYTVSLCYHYTLGSSH | |
| | | NQTIRECVKTEQGVSRYTIK | |
| | | NLLPYRNVHVRLVLTNPEG | |
| | | RKEGKEVTFQTDEDVPSGI | |
| | | AAESLTFTPLEDMIFLKWEE | |
| | | PQEPNGLITQYEISYQSIESS | |
| | | DPAVNVPGPRRTISKLRNE | |
| | | TYHVFSNLHPGTTYLFSVR | |
| | | ARTGKGFGQAALTEITTNIS | |
| | | APSEDYADMPSPLGESENT | |
| | | ITVLLRPAQGRGAPISVYQV | |
| | | IVEEERARRLRREPGGQDC | |
| | | FPVPLTFEAALARGLVHYF | |
| | | GAELAASSLPEAMPFTVGD | |
| | | NQTYRGFWNPPLEPRKAY | |
| | | LIYFQAASHLKGETRLNCIRI | |
| | | ARKAACKESKRPLEVSQRS | |
| | | EEMGLILGICAGGLAVLILLL | |
| | | GAIIVIIRKGKPVNMTKATV | |
| | | NYRQEKTHMMSAVDRSFT | |
| | | DQSTLQEDERLGLSFMDT | |
| | | HGYSTRGDQRSGGVTEAS | |
| | | SLLGGSPRRPCGRKGSPYH | |
| | | TGQLHPAVRVADLLQHIN | |
| | | QMKTAEGYGFKQEYESFFE | |
| | | GWDATKKKDKVKGSRQEP | |
| | | MPAYDRHRVKLHPMLGD | |
| | | PNADYINANYIDGYHRSNH | |
| | | FIATQGPKPEMVYDFWR | |
| | | MVWQEHCSSIVMITKLVE | |
| | | VGRVKCSRYWPEDSDTYG | |
| | | DIKIMLVKTETLAEYVVRTF | |
| | | ALERRGYSARHEVRQFHFT | |
| | | AWPEHGVPYHATGLLAFIR | |
| | | RVKASTPPDAGPIVIHCSA | |
| | | GTGRTGCYIVLDVMLDMA | |
| | | ECEGVVDIYNCVKTLCSRR | |
| | | VNMIQTEEQYIFIHDAILEA | |
| | | CLCGETTIPVSEFKATYKEM | |
| | | IRIDPQSNSSQLREEFQTLN | |
| | | SVTPPLDVEECSIALLPRNR | |
| | | DKNRSMDVLPPDRCLPFLI | |
| | | STDGDSNNYINAALTDSYT | |
| | | RSAAFIVTLHPLQSTTPDF | |
| | | WRLVYDYGCTSIVMLNQL | |
| | | NQSNSAWPCLQYWPEPG | |
| | | RQQYGLMEVEFMSGTAD | |
| | | EDLVARVFRVQNISRLQEG | |
| | | HLLVRHFQFLRWSAYRDTP | |
| | | DSKKAFLHLLAEVDKWQA | |
| | | ESGDGRTIVHCLNGGGRS | |
| | | GTFCACATVLEMIRCHNLV | |
| | | DVFFAAKTLRNYKPNMVE | |
| | | TMDQYHFCYDVALEYLEGL | |
| | | ESR | |
| SEQ ID NO: 1855 | ENSG00000066248.10 | METRESEDLEKTRRKSASD | A*02:03, A*11:01, A*11:01, |
| | | QWNTDNEPAKVKPELLPE | A*11:02, A*11:02, A*24:02, |
| | | KEETSQADQDIQDKEPHC | A*24:10, A*33:03, A*33:03, |
| | | HIPIKRNSIFNRSIRRKSKAK | A*34:01, B*15:01, B*15:21, |
| | | ARDNPERNASCLADSQDN | B*15:27, B*39:01, B*40:01, |
| | | GKSVNEPLTLNIPWSRMPP | B*46:01, B*58:01, C*03:02, |
| | | CRT | C*03:04, C*03:67, C*12:02, |
| | | | C*14:02 |
| SEQ ID NO: 1856 | ENSG00000077092.14 | MTTSGHACPVPAVNGHM | A*24:02, A*24:07, A*24:10, |
| | | THYPATPYPLLFPPVIGGLS | A*34:01, B*15:01, B*15:21, |
| | | LPPLHGLHGHPPPSGCSTP | B*15:27, B*46:01, B*51:01, |
| | | SPATIETQS | B*55:02, C*01:02, C*03:02, |
| | | | C*04:01, C*07:02, C*12:02, |
| | | | C*14:02 |
| SEQ ID NO: 1857 | ENSG00000079308.12 | MTRLSWCFSCVIRWGKYL | A*02:03, A*02:07, B*27:04, |
| | | FSCLLPLRFCLRSQPEDLEA | B*39:01, B*46:01, C*01:02, |
| | | PKTHRFKVKTFKKVKPCGIC | C*03:02, C*03:04, C*03:67, |
| | | RQVITQEGCTCKVCSFSCH | C*08:01, C*14:02 |
| | | RKCQAKVAAPCVPPSNHE | |
| | | LVPITTENAPKNVVDKGEG | |
| | | ASRGGNTRKSLEDNGSTRV | |
| | | TPSVQPHLQPIRN | |
| SEQ ID NO: 1858 | ENSG00000080823.17 | MKNYKAIGKIGEGTFSEVM | A*02:03, A*33:03, B*40:01, |
| | | KMQSLRDGNYYACKQMK | C*03:02, C*14:02 |
| | | QRFESIEQVNNLREIQALRR | |
| | | LNPHPNILMLHEVVFDRKS | |
| | | GSLALICELMDMNIYELIRG | |
| | | RRYPLSEKKIMHYMYQLCK | |
| | | SLDHIHRNGIFHRDVKPENI | |
| | | LIKQDVLKLGD | |
| SEQ ID NO: 1859 | ENSG00000097021.15 | MARPGLIHSAPGLPDTCAL | A*02:03 |
| | | LQPPAASAAAAPS | |
| SEQ ID NO: 1860 | ENSG00000100441.5 | MPTWGARPASPDRFAVSA | A*02:03, A*02:07, A*11:01, |
| | | EAENKVREQQPHVERIFSV | A*11:02, A*24:02, A*24:07, |
| | | GVSVLPKDCPDNPHIWLQ | A*24:10, A*33:03, B*15:01, |
| | | LEGPKENASRAKEYLKGLCS | B*15:21, B*15:27, B*40:01, |
| | | PELQDEIHYPPKLHCIFLGA | B*40:06, B*55:02, B*58:01, |
| | | QGFFLDCLAWSTSAHLVPR | C*03:02, C*03:04, C*03:67, |
| | | APGSLMISGLTEAFVMAQS | C*04:01, C*04:03, C*07:02, |
| | | RVEELAERLSWDFTPGPSS | C*08:01, C*14:02, C*15:02 |
| | | GASQCTGVLRDFSALLQSP | |
| | | GDAHREALLQLPLAVQEEL | |
| | | LSLVQEASSGQGPGALAS | |
| | | WEGRSSALLGAQCQGVRA | |
| | | PPSDGRESLDTGSMGPGD | |
| | | CRGARGDTYAVEKEGGKQ | |
| | | GGPREMDWGWKELPGEE | |
| | | AWEREVALRPQSVGGGAR | |
| | | ESAPLKGKALGKEEIALGG | |
| | | GGFCVHREPPGAHGSCHR | |
| | | AAQSRGASLLQRLHNGNA | |
| | | SPPRVPSPPPAPEPPWHC | |
| | | GDRGDCGDRGDVGDRGD | |
| | | KQQGMARGRGPQWKRG | |
| | | ARGGNLVTGTQRFKEALQ | |
| | | DPFTLCLANVPGQPDLRHI | |
| | | VIDGSNVAMVHGLQHYFS | |
| | | SRGIAIAVQYFWDRGHRDI | |
| | | TVFVPQWRFSKDAKVRES | |
| | | HFLQKLYSLSLLSLTPSRVM | |
| | | DGKRISSYDDRFMVKLAEE | |
| | | TDGIIVSNDQFRDLAEESEK | |
| | | W | |
| SEQ ID NO: 1861 | ENSG00000103056.7 | MVLYTTPFPNSCLSALHCV | A*02:03, A*02:07, A*11:01, |
| | | SWALIFPCYWLVDRLAASF | A*11:02, A*24:02, A*24:07, |
| | | IPTTYEKRQRADDPCCLQLL | A*24:10, B*15:01, B*15:21, |
| | | CTALFTPIYLALLVASLPFAF | B*15:27, B*27:04, B*38:02, |
| | | LGFLFWSPLQSARRPYIYSR | B*39:01, B*40:01, B*40:06, |
| | | LEDKGLAGGAALLSEWKG | B*46:01, B*51:01, B*55:02, |
| | | TGPGKSFCFATANVCLLPD | B*58:01, C*01:02, C*03:02, |
| | | SLARVNNLFNTQARAKEIG | C*03:04, C*03:67, C*04:01, |
| | | QRIRNGAARPQIKIYIDSPT | C*04:03, C*07:02, C*08:01, |
| | | NTSISAASFSSLVSPQGGD | C*12:02, C*15:02 |
| | | GVARAVPGSIKRTASVEYK | |
| | | GDGGRHPGDEAANGPAS | |
| | | GDPVDSSSPEDACIVRIGG | |
| | | EEGGRPPEADDPVPGGQA | |
| | | RNGAGGGPRGQTPNHNQ | |
| | | QDGDSGSLGSPSASRESLV | |
| | | KGRAGPDTSASGEPGANS | |
| | | KLLYKASVVKKAAARRRRH | |
| | | PDEAFDHEVSAFFPANLDF | |
| | | LCLQEVFDKRAATKLKEQL | |
| | | HGYFEYILYDVGVYGCQGC | |
| | | CSFKCLNSGLLFASRYPI | |
| SEQ ID NO: 1862 | ENSG00000103227.14 | MLGAGLIKIRGDRCWRDL | A*02:03, A*11:01, A*11:02, |
| | | TCMDFHYETQPMPNPVA | A*24:02, A*24:07, A*24:10, |
| | | YYLHHSPWWFHRFETLSN | A*33:03, B*15:01, B*38:02, |
| | | HFIELLVPFFLFLGRRACIIH | B*40:01, B*58:01, C*03:02, |
| | | GVLQILFQAVLIVSGNLSFL | C*03:04, C*07:02, C*14:02, |
| | | NWLTMVPSLACFDDATLG | C*15:02 |
| | | FLFPSGPGSLKDRVLQMQ | |
| | | RDIRGARPEPRFGSVVRRA | |
| | | ANVSLGVLLAWLSVPVVLN | |
| | | LLSSRQVMNTHFNSLHIVN | |
| | | TYGAFGSITKERAEVILQGT | |
| | | ASSNASAPDAMWEDYEFK | |
| | | CKPGDPSRRPCLISPYHYRL | |
| | | DWLMWFAAFQTYEHND | |
| | | WIIHLAGKLLASDAEALSLL | |
| | | AHNPFAGRPPPRWVRGE | |
| | | HYRYKFSRPGGRHAAEGK | |
| | | WWVRKRIGAYFPPLS | |
| SEQ ID NO: 1863 | ENSG00000105559.7 | MEGSRPRSSLSLASSASTIS | A*02:03, A*11:01, A*11:02, |
| | | SLSSLSPKKPTRAVNKIHAF | A*24:10, A*33:03, B*39:01, |
| | | GKRGNALRRDPNLPVHIR | B*40:01, B*58:01, C*03:02, |
| | | GWLHKQDSSGLRLWKRR | C*03:04, C*14:02 |
| | | WFVLSGHCLFYYKDSREES | |
| | | VLGSVLLPSYNIRPDGPGA | |
| | | PRGRRFTFTAEHPGMRTY | |
| | | VLAADTLEDLRGWLRALG | |
| | | RASRAEGDDYGQPRSPAR | |
| | | PQPGEGPGGPGGPPEVSR | |
| | | GEEGRISESPEVTRLSRGRG | |
| | | RPRLLTPSPTTDLHSGLQM | |
| | | RRARSPDLFTPLSRPPSPLS | |
| | | LPRPRSAPARRPPAPSGDT | |
| | | APPARPHTPLSRIDVRPPLD | |
| | | WGPQRQTLSRPPTPRRGP | |
| | | PSEAGGGKPPRSPQHWSQ | |
| | | EPRTQAHSGSPTYLQLPPR | |
| | | PPGTRASMVLLPGPPLEST | |
| | | FHQSLETDTLLTKLCGQDR | |
| | | LLRRLQEEIDQKQEEKEQLE | |
| | | AALELTRQQLGQATREAG | |
| | | APGRAWGRQRLLQDRLVS | |
| | | VRATLCHLTQERERVWDT | |
| | | YSGLEQELGTLRETLEYLLH | |
| | | LGSPQDRVSAQQQLWMV | |
| | | EDTLAGLGGPQKPPPHTEP | |
| | | DSPSPVLQGEESSERESLPE | |
| | | SLELSSPRSPETDWGRPPG | |
| | | GDKDLASPHLGLGSPRVSR | |
| | | ASSPEGRHLPSPQLGTKAP | |
| | | VARPRMSAQEQLERMRR | |
| | | NQECGRPFPRPTSPRLLTL | |
| | | GRTLSPARRQPDVEQRPV | |
| | | VGHSGAQKWLRSSGSWSS | |
| | | PRNTTPYLPTSEGHRERVLS | |
| | | LSQALATEASQWHRMMT | |
| | | GGNLDSQGDPLPGVPLPP | |
| | | SDPTRQETPPPRSPPVANS | |
| | | GSTGFSRRGSGRGGGPTP | |
| | | WGPAWDAGIAPPVLPQD | |
| | | EGAWPLRVTLLQSSF | |
| SEQ ID NO: 1864 | ENSG00000105639.14 | MAPPSEETPLIPQRSCSLLS | A*02:03, A*11:01, A*11:02, |
| | | TEAGALHVLLPARGPGPPQ | A*24:02, A*24:07, A*24:10, |
| | | RLSFSFGDHLAEDLCVQAA | A*33:03, B*15:01, B*39:01, |
| | | KASGILPVYHSLFALATEDL | B*40:01, B*55:02, B*58:01, |
| | | SCWFPPSHIFSVEDASTQV | C*03:02, C*03:04, C*07:02, |
| | | LLYRIRFYFPNWFGLEKCHR | C*14:02 |
| | | FGLRKDLASAILDLPVLEHL | |
| | | FAQHRSDLVSGRLPVGLSL | |
| | | KEQGECLSLAVLDLARMAR | |
| | | EQAQRPGELLKTVSYKACL | |
| | | PPSLRDLIQGLSFVTRRRIR | |
| | | RTVRRALRRVAACQADRH | |
| | | SLMAKYIMDLERLDPAGA | |
| | | AETFHVGLPGALGGHDGL | |
| | | GLLRVAGDGGIAWTQGEQ | |
| | | EVLQPFCDFPEIVDISIKQA | |
| | | PRVGPAGEHRLVTVTRTD | |
| | | NQILEAEFPGLPEALSFVAL | |
| | | VDGYFRLTTDSQHFFCKEV | |
| | | APPRLLEEVAEQCHGPITLD | |
| | | FAINKLKTGGSRPGSYVLRR | |
| | | SPQDFDSFLLTVCVQNPLG | |
| | | PDYKGCLIRRSPTGTFLLVG | |
| | | LSRPHSSLRELLATCWDGG | |
| | | LHVDGVAVTLTSCCIPRPKE | |
| | | KSNLIVVQRGHSPPTSSLV | |
| | | QPQSQYQLSQMTFHKIPA | |
| | | DSLEWHENLGHGSFTKIYR | |
| | | GCRHEVVDGEARKTEVLLK | |
| | | VMDAKHKNCMESFLEAAS | |
| | | LMSQVSYRHLVLLHGVCM | |
| | | AGDSTMVQEFVHLGAIDM | |
| | | YLRKRGHLVPASWKLQVV | |
| | | KQLAYALNYLEDKGLPHGN | |
| | | VSARKVLLAREGADGSPPFI | |
| | | KLSDPGVSPAVLSLEMLTD | |
| | | RIPWVAPECLREAQTLSLE | |
| | | ADKWGFGATVWEVFSGV | |
| | | TMPISALDPAKKLQFYEDR | |
| | | QQLPAPKWTELALLIQQC | |
| | | MAYEPVQRPSFRAVIRDLN | |
| | | SLISSDYELLSDPTPGALAPR | |
| | | DGLWNGAQLYACQDPTIF | |
| | | EERHLKYISQLGKGNFGSV | |
| | | ELCRYDPLGDNTGALVAVK | |
| | | QLQHSGPDQQRDFQREIQ | |
| | | ILKALHSDFIVKYRGVSYGP | |
| | | GRQSLRLVMEYLPSGCLRD | |
| | | FLQRHRARLDASRLLLYSSQ | |
| | | ICKGMEYLGSRRCVHRDLA | |
| | | ARNILVESEAHVKIADFGLA | |
| | | KLLPLDKDYYVVREPGQSPI | |
| | | FWYAPESLSDNIFSRQSDV | |
| | | WSFGVVLYELFTYCDKSCS | |
| | | PSAEFLRMMGCERDVPAL | |
| | | CRLLELLEEGQRLPAPPACP | |
| | | AEVHELMKLCWAPSPQDR | |
| | | PSFSALGPQLDMLWSGSR | |
| | | GCETHAFTAHPEGKHHSLS | |
| | | FS | |
| SEQ ID NO: 1865 | ENSG00000105650.17 | MQAPVPHSQRRESFLYRS | A*02:03, B*15:01, B*39:01, |
| | | DSDYELSPKAMSRNSSVAS | B*40:01, C*03:02, C*03:04, |
| | | DLHGEDMIVTPFAQVLASL | C*15:02 |
| | | RTVRSNVAALARQQCLGA | |
| | | AKQGPVGN | |
| SEQ ID NO: 1866 | ENSG00000105963.9 | MAKERRRAVLELLQRPGN | A*02:03, A*24:10, B*15:01, |
| | | ARCADCGAPDPDWASYTL | C*03:02, C*03:04 |
| | | GVFICLSCSGIHRNIPQVSK | |
| | | VKSVRLDAWEEAQVEFMA | |
| | | SHGNDAARARFESKVPSFY | |
| | | YRPTP | |
| SEQ ID NO: 1867 | ENSG00000105976.10 | MKAPAVLAPGILVLLFTLV | A*02:03, A*11:01, A*11:02, |
| | | QRSNGECKEALAKSEMNV | A*24:02, A*24:07, A*24:10, |
| | | NMKYQLPNFTAETPIQNVI | A*33:03, A*34:01, B*15:01, |
| | | LHEHHIFLGATNYIYVLNEE | B*15:27, B*39:01, B*40:01, |
| | | DLQKVAEYKTGPVLEHPDC | B*58:01, C*03:02, C*03:04, |
| | | FPCQDCSSKANLSGGVWK | C*03:67, C*07:02, C*12:02, |
| | | DNINMALVVDTYYDDQLIS | C*14:02, C*15:02 |
| | | CGSVNRGTCQRHVFPHNH | |
| | | TADIQSEVHCIFSPQIEEPS | |
| | | QCPDCVVSALGAKVLSSVK | |
| | | DRFINFFVGNTINSSYFPDH | |
| | | PLHSISVRRLKETKDGFMFL | |
| | | TDQSYIDVLPEFRDSYPIKY | |
| | | VHAFESNNFIYFLTVQRETL | |
| | | DAQTFHTRIIRFCSINSGLH | |
| | | SYMEMPLECILTEKRKKRST | |
| | | KKEVFNILQAAYVSKPGAQ | |
| | | LARQIGASLNDDILFGVFA | |
| | | QSKPDSAEPMDRSAMCAF | |
| | | PIKYVNDFFNKIVNKNNVR | |
| | | CLQHFYGPNHEHCFNRTLL | |
| | | RNSSGCEARRDEYRTEFTT | |
| | | ALQRVDLFMGQFSEVLLTS | |
| | | ISTFIKGDLTIANLGTSEGRF | |
| | | MQVVVSRSGPSTPHVNFL | |
| | | LDSHPVSPEVIVEHTLNQN | |
| | | GYTLVITGKKITKIPLNGLGC | |
| | | RHFQSCSQCLSAPPFVQCG | |
| | | WCHDKCVRSEECLSGTWT | |
| | | QQICLPAIYKVFPNSAPLEG | |
| | | GTRLTICGWDFGFRRNNK | |
| | | FDLKKTRVLLGNESCTLTLS | |
| | | ESTMNTLKCTVGPAMNKH | |
| | | FNMSIIISNGHGTTQYSTFS | |
| | | YVDPVITSISPKYGPMAGG | |
| | | TLLTLTGNYLNSGNSRHISI | |
| | | GGKTCTLKSVSNSILECYTP | |
| | | AQTISTEFAVKLKIDLANRE | |
| | | TSIFSYREDPIVYEIHPTKSFI | |
| | | SGGSTITGVGKNLNSVSVP | |
| | | RMVINVHEAGRNFTVACQ | |
| | | HRSNSEIICCTTPSLQQLNL | |
| | | QLPLKTKAFFMLDGILSKYF | |
| | | DLIYVHNPVFKPFEKPVMIS | |
| | | MGNENVLEIKGNDIDPEA | |
| | | VKGEVLKVGNKSCENIHLH | |
| | | SEAVLCTVPNDLLKLNSELN | |
| | | IEWKQAISSTVLGKVIVQP | |
| | | DQNFTGLIAGVVSISTALLL | |
| | | LLGFFLWLKKRKQIKDLGSE | |
| | | LVRYDARVHTPHLDRLVSA | |
| | | RSVSPTTEMVSNESVDYRA | |
| | | TFPEDQFPNSSQNGSCRQ | |
| | | VQYPLTDMSPILTSGDSDIS | |
| | | SPLLQNTVHIDLSALNPELV | |
| | | QAVQHVVIGPSSLIVHFNE | |
| | | VIGRGHFGCVYHGTLLDN | |
| | | DGKKIHCAVKSLNRITDIGE | |
| | | VSQFLTEGIIMKDFSHPNVL | |
| | | SLLGICLRSEGSPLVVLPYM | |
| | | KHGDLRNFIRNETHNPTVK | |
| | | DLIGFGLQVAKGMKYLASK | |
| | | KFVHRDLAARNCMLDEKF | |
| | | TVKVADFGLARDMYDKEY | |
| | | YSVHNKTGAKLPVKWMAL | |
| | | ESLQTQKFTTKSDVWSFGV | |
| | | LLWELMTRGAPPYPDVNT | |
| | | FDITVYLLQGRRLLQPEYCP | |
| | | DPLYEVMLKCWHPKAEM | |
| | | RPSFSELVSRISAIFSTFIGEH | |
| | | YVHVNATYVNVKCVAPYP | |
| | | SLLSSEDNADDEVDTRPAS | |
| | | FWETS | |
| SEQ ID NO: 1868 | ENSG00000107317.7 | MATHHTLWMGLALLGVL | A*02:03, B*15:01, C*03:02, |
| | | GDLQAAPEAQVSVQPNFQ | C*03:04, C*12:02 |
| | | QD | |
| SEQ ID NO: 1869 | ENSG00000111700.8 | MDQHQHLNKTAESASSEK | A*11:01, A*11:02 |
| | | KKTRRCNGFK | |
| SEQ ID NO: 1870 | ENSG00000111860.9 | MWGRFLAPEASGRDSPG | A*02:03, A*11:01, A*11:02, |
| | | GARSFPAGPDYSSAWLPA | A*24:02, A*24:07, A*24:10, |
| | | NESLWQATTVPSNHRNN | A*33:03, B*15:01, B*15:27, |
| | | HIRRHSIASDSGDTGIGTSC | B*39:01, B*40:01, C*03:02, |
| | | SDSVEDHSTSSGTLSFKPSQ | C*03:04, C*14:02 |
| | | SLITLPTAHVMPSNSSASIS | |
| | | KLRESLTPDGSKWSTSLMQ | |
| | | TLGNHSRGEQDSSLDMKD | |
| | | FRPLRKWSSLSKLTAPDNC | |
| | | GQGGTVCREESRNGLEKIG | |
| | | KAKALTSQLRTIGPSCLHDS | |
| | | MEMLRLEDKEINKKRSSTL | |
| | | DCKYKFESCSKEDFRASSST | |
| | | LRRQPVDMTYSALPESKPI | |
| | | MTSSEAFEPPKYLMLGQQ | |
| | | AVGGVPIQPSVRTQMWLT | |
| | | EQLRTNPLEGRNTEDSYSL | |
| | | APWQQQQIEDFRQGSETP | |
| | | MQVLTGSSRQSYSPGYQD | |
| | | FSKWESMLKIKEGLLRQKEI | |
| | | VIDRQKQQITHLHERIRDN | |
| | | ELRAQHAMLGHYVNCEDS | |
| | | YVASLQPQYENTSLQTPFS | |
| | | EESVSHSQQGEFEQKLAST | |
| | | EKEVLQLNEFLKQRLSLFSE | |
| | | EKKKLEEKLKTRDRYISSLKK | |
| | | KCQKESEQNKEKQRRIETL | |
| | | EKYLADLPTLDDVQSQSLQ | |
| | | LQILEEKNKNLQEALIDTEK | |
| | | KLEEIKKQCQDKETQLICQK | |
| | | KKEKELVTTVQSLQQKVER | |
| | | CLEDGIRLPMLDAKQLQNE | |
| | | NDNLRQQNETASKIIDSQQ | |
| | | DEIDRMILEIQSMQGKLSK | |
| | | EKLTTQKMMEELEKKERN | |
| | | VQRLTKALLENQRQTDETC | |
| | | SLLDQGQEPDQSRQQTVL | |
| | | SKRPLFDLTVIDQLFKEMSC | |
| | | CLFDLKALCSILNQRAQGK | |
| | | EPNLSLLLGIRSMNCSAEET | |
| | | ENDHSTETLTKKLSDVCQL | |
| | | RRDIDELRTTISDRYAQDM | |
| | | GDNCITQ | |
| SEQ ID NO: 1871 | ENSG00000111912.14 | XEKTCSSLEREPHFSLLTMR | A*02:03, A*11:01, A*11:02, |
| | | GQRLPLDIQIFYCARPDEEP | A*24:02, A*24:07, A*24:10, |
| | | FVKIITVEEAKRRKSTCSYYE | A*33:03, B*15:01, B*15:27, |
| | | DEDEEVLPVLRPHSALLEN | B*40:01, B*55:02, C*03:02, |
| | | MHIEQLARRLPARVQGYP | C*03:04, C*03:67, C*12:02, |
| | | WRLAYSTLEHGTSLKTLYRK | C*14:02, C*15:02 |
| | | SASLDSPVLLVIKDMDNQIF | |
| | | GAYATHPFKFSDHYYGTGE | |
| | | TFLYTFSPHFKVFKWSGEN | |
| | | SYFINGDISSLELGGGGGRF | |
| | | GLWLDADLYHGRSNSCST | |
| | | FNNDILSKKEDFIVQDLEV | |
| | | WAFD | |
| SEQ ID NO: 1872 | ENSG00000112033.9 | MEQPQEEAPEVREEEEKEE | A*02:03, A*02:07, A*11:01, |
| | | VAEAEGAPELNGGPQHAL | A*11:02, A*24:02, A*24:07, |
| | | PSSSYTDLSRSSSPPSLLDQL | A*24:10, A*33:03, A*34:01, |
| | | QMGCDGASCGSLNMECR | B*15:01, B*15:21, B*15:27, |
| | | VCGDKASGFHYGVHACEG | B*27:04, B*38:02, B*39:01, |
| | | CKGFFRRTIRMKLEYEKCER | B*40:01, B*40:06, B*46:01, |
| | | SCKIQKKNRNKCQYCRFQK | B*51:01, B*55:02, B*58:01, |
| | | CLALGMSHNAIRFGRMPE | C*01:02, C*03:02, C*03:04, |
| | | AEKRKLVAGLTANEGSQYN | C*04:01, C*04:03, C*07:02, |
| | | PQVADLKAFSKHIYNAYLK | C*08:01, C*12:02, C*15:02 |
| | | NFNMTKKKARSILTGKASH | |
| | | TAPFVIHDIETLWQAEKGL | |
| | | VWKQLVNGLPPYKEISVHV | |
| | | FYRCQCTTVETVRELTEFAK | |
| | | SIPSFSSLFLNDQVTLLKYG | |
| | | VHEAIFAMLASIVNKDGLL | |
| | | VANGSGFVTREFLRSLRKP | |
| | | FSDIIEPKFEFAVKFNALELD | |
| | | DSDLALFIAAIILCGDRPGL | |
| | | MNVPRVEAIQDTILRALEF | |
| | | HLQANHPDAQYLFP | |
| SEQ ID NO: 1873 | ENSG00000113594.5 | MMDIYVCLKRPSWMVDN | A*02:03, A*11:01, A*11:02, |
| | | KRMRTASNFQWLLSTFILL | A*24:02, A*24:07, A*24:10, |
| | | YLMNQVNSQKKGAPHDLK | A*33:03, A*34:01, B*15:01, |
| | | CVTNNLQVWNCSWKAPS | B*39:01, B*40:01, B*58:01, |
| | | GTGRGTDYEVCIENRSRSC | C*03:02, C*03:04, C*03:67, |
| | | YQLEKTSIKIPALSHGDYEITI | C*12:02, C*14:02, C*15:02 |
| | | NSLHDFGSSTSKFTLNEQN | |
| | | VSLIPDTPEILNLSADFSTST | |
| | | LYLKWNDRGSVFPHRSNVI | |
| | | WEIKVLRKESMELVKLVTH | |
| | | NTTLNGKDTLHHWSWAS | |
| | | DMPLECAIHFVEIRCYIDNL | |
| | | HFSGLEEWSDWSPVKNIS | |
| | | WIPDSQTKVFPQDKVILVG | |
| | | SDITFCCVSQEKVLSALIGH | |
| | | TNCPLIHLDGENVAIKIRNIS | |
| | | VSASSGTNVVFTTEDNIFG | |
| | | TVIFAGYPPDTPQQLNCET | |
| | | HDLKEIICSWNPGRVTALV | |
| | | GPRATSYTLVESFSGKYVRL | |
| | | KRAEAPTNESYQLLFQMLP | |
| | | NQEIYNFTLNAHNPLGRSQ | |
| | | STILVNITEKVYPHTPTSFKV | |
| | | KDINSTAVKLSWHLPGNFA | |
| | | KINFLCEIEIKKSNSVQEQR | |
| | | NVTIKGVENSSYLVALDKL | |
| | | NPYTLYTFRIRCSTETFWK | |
| | | WSKWSNKKQHLTTEASPS | |
| | | KGPDTWREWSSDGKNLIIY | |
| | | WKPLPINEANGKILSYNVS | |
| | | CSSDEETQSLSEIPDPQHKA | |
| | | EIRLDKNDYIISVVAKNSVG | |
| | | SSPPSKIASMEIPNDDLKIE | |
| | | QVVGMGKGILLTWHYDP | |
| | | NMTCDYVIKWCNSSRSEP | |
| | | CLMDWRKVPSNSTETVIES | |
| | | DEFRPGIRYNFFLYGCRNQ | |
| | | GYQLLRSMIGYIEELAPIVA | |
| | | PNFTVEDTSADSILVKWED | |
| | | IPVEELRGFLRGYLFYFGKG | |
| | | ERDTSKMRVLESGRSDIKV | |
| | | KNITDISQKTLRIADLQGKT | |
| | | SYHLVLRAYTDGGVGPEKS | |
| | | MYVVTKENSVGLIIAILIPVA | |
| | | VAVIVGVVTSILCYRKREWI | |
| | | KETFYPDIPNPENCKALQF | |
| | | QKSVCEGSSALKTLEMNPC | |
| | | TPNNVEVLETRSAFPKIEDT | |
| | | EIISPVAERPEDRSDAEPEN | |
| | | HVVVSYCPPIIEEEIPNPAA | |
| | | DEAGGTAQVIYIDVQSMY | |
| | | QPQAKPEEEQENDPVGGA | |
| | | GYKPQMHLPINSTVEDIAA | |
| | | EEDLDKTAGYRPQANVNT | |
| | | WNLVSPDSPRSIDSNSEIVS | |
| | | FGSPCSINSRQFLIPPKDED | |
| | | SPKSNGGGWSFTNFFQNK | |
| | | PND | |
| SEQ ID NO: 1874 | ENSG00000114541.10 | MASVFMCGVEDLLFSGSR | A*02:03, A*11:01, A*11:02, |
| | | FVWNLTVSTLRRWYTERLR | A*24:10, A*33:03, A*34:01, |
| | | ACHQVLRTWCGLQDVYQ | B*40:01, B*58:01, C*07:02, |
| | | MTEGRHCQVHLLDDRRLE | C*12:02, C*14:02 |
| | | LLVQPKLLARELLDLVASHF | |
| | | NLKEKEYFGITFIDDTGQQ | |
| | | NWLQLDHRVLDHDLPKKP | |
| | | GPTILHFAVRFYIESISFLKD | |
| | | KTTVELFFLNAKACVHKGQ | |
| | | IEVESETIFKLAAFILQEAKG | |
| | | DYTSDENARKDLKTLPAFP | |
| | | TKTLQEHPSLAYCEDRVIEH | |
| | | YLKIKGLTRGQAVVQY | |
| SEQ ID NO: 1875 | ENSG00000115977.14 | MKKFFDSRREQGGSGLGS | A*02:03, A*11:01, A*11:02, |
| | | GSSGGGGSTSGLGSGYIGR | A*24:02, A*24:07, A*24:10, |
| | | VFGIGRQQVTVDEVLAEG | B*15:01, B*39:01, B*40:01, |
| | | GFAIVFLVRTSNGMKCALK | C*03:02, C*12:02, C*14:02 |
| | | RMFVNNEHDLQVCKREIQI | |
| | | MRDLSGHKNIVGYIDSSIN | |
| | | NVSSGDVWEVLILMDFCR | |
| | | GGQVVNLMNQRLQTGFT | |
| | | ENEVLQIFCDTCEAVARLH | |
| | | QCKTPIIHRDLKVENILLHD | |
| | | RGHYVLCDFGSATNKFQN | |
| | | PQTEGVNAVEDEIKKYTTL | |
| | | SYRAPEMVNLYSGKIITTKA | |
| | | DIWALGCLLYKLCYFTLPFG | |
| | | ESQVAICDGNFTIPDNSRYS | |
| | | QDMHCLIRYMLEPDPDKR | |
| | | PDIYQVSYFSFKLLKKECPIP | |
| | | NVQNSPIPAKLPEPVKASE | |
| | | AAAKKTQPKARLTDPIPTTE | |
| | | TSIAPRQRPKAGQTQPNP | |
| | | GILPIQPALTPRKRATVQPP | |
| | | PQAAGSSNQPGLLASVPQ | |
| | | PKPQAPPSQPLPQTQAKQ | |
| | | PQAPPTPQQTPSTQAQGL | |
| | | PAQAQATPQHQQQLFLK | |
| | | QQQQQQQPPPAQQQPA | |
| | | GTFYQQQQAQTQQFQAV | |
| | | HPATQKPAIAQFPVVSQG | |
| | | GSQQQLMQNFYQQQQQ | |
| | | QQQQQQQQQLATALHQ | |
| | | QQLMTQQAALQQKPTMA | |
| | | AGQQPQPQPAAAPQPAP | |
| | | AQEPAIQAPVRQQPKVQT | |
| | | TPPPAVQGQKVGSLTPPSS | |
| | | PKTQRAGHRRILSDVTHSA | |
| | | VFGVPASKSTQLLQAAAAE | |
| | | AELLDPGRQTLQ | |
| SEQ ID NO: 1876 | ENSG00000116833.9 | MSSNSDTGDLQESLKHGLT | A*02:03 |
| | | PIGAGLPDRHGSPIPARGR | |
| | | LV | |
| SEQ ID NO: 1877 | ENSG00000118855.14 | MDAGKLARHPTDTGSERA | C*03:02, C*03:04, C*14:02 |
| | | VPALAEIRPWWAPPLRPQ | |
| SEQ ID NO: 1878 | ENSG00000119547.5 | MKAAYTAYRCLTKDLEGCA | A*02:03, A*11:01, A*11:02, |
| | | MNPELTMESLGTLHGPAG | A*24:10, A*33:03, B*15:01, |
| | | GGSGGGGGGGGGGGGG | B*15:27, B*39:01, B*58:01, |
| | | GPGHEQELLASPSPHHAG | C*03:02, C*03:04, C*07:02, |
| | | RGAAGSLRGPPPPPTAHQ | C*14:02 |
| | | ELGTAAAAAAAASRSAMV | |
| | | TSMASILDGGDYRPELSIPL | |
| | | HHAMSMSCDSSPPGMG | |
| | | MSNTYTTLTPLQPLPPISTV | |
| | | SDKFHHPHPHHHPHHHH | |
| | | HHHHQRLSGNVSGSFTLM | |
| | | RDERGLPAMNNLYSPYKE | |
| | | MPGMSQSLSPLAATPLGN | |
| | | GLGGLHNAQQSLPNYGPP | |
| | | GHDKMLSPNFDAHHTAM | |
| | | LTRGEQHLSRGLGTPPAA | |
| | | MMSHLNGLHHPGHTQSH | |
| | | GPVLAPSRERPPSSSSGSQ | |
| | | VATSGQLEEINTKEVAQRIT | |
| | | AELKRYSIPQAIFAQRVLCR | |
| | | SQGTLSDLLRNPKPWSKLK | |
| | | SGRETFRRMWKWLQEPEF | |
| | | QRMSALRLAA | |
| SEQ ID NO: 1879 | ENSG00000125826.15 | MDEKTKKAEEMALSLTRA | A*02:03, A*02:07, A*11:01, |
| | | VAGGDEQVAMKCAIWLA | A*11:02, A*24:10, A*33:03, |
| | | EQRVPLSVQLKPEVSPTQD | B*40:01, C*03:02, C*03:04 |
| | | IRLWVSVEDAQMHTVTIW | |
| | | LTVRPDMTVASLKDMVFL | |
| | | DYGFPPVLQQWVIGQRLA | |
| | | RDQETLHSHGVRQNGDSA | |
| | | YLYLLSARNTSLNPQELQRE | |
| | | RQLRMLEDLGFKDLTLQPR | |
| | | GPLEPGPPKPGVPQEPGR | |
| | | GQPDAVPEPPPVGWQCP | |
| | | GCTFINKPTRPGCEMCCRA | |
| | | RPEAYQVPASYQPDEEERA | |
| | | RLAGEEEALRQYQQRKQQ | |
| | | QQEGNYLQHVQLDQRSLV | |
| | | LNTEPAECPVCYSVLAPGE | |
| | | AVVLRECLHTFCRECLQGTI | |
| | | RNSQEAEVSCPFIDNTYSCS | |
| | | GKLLEREIKALLTPEDYQRF | |
| | | LDLGISIAENRSAFSYHCKT | |
| | | PDCKGWCFFEDDVNEFTC | |
| | | PVCFHVNCLLCKAIHEQM | |
| | | NCKEYQEDLALRAQNDVA | |
| | | ARQTTEMLKVMLQQGEA | |
| | | MRCPQCQIVVQKKDGCD | |
| | | WIRCTVCHTEICWVTKGPR | |
| | | WGPGGPGDTSGGCRCRV | |
| | | NGIPCHPSCQNCH | |
| SEQ ID NO: 1880 | ENSG00000129116.13 | MSALASRSAPAMQSSGSF | A*02:03, A*11:01, A*11:02, |
| | | NYARPKQFIAAQNLGPAS | A*24:02, A*24:10, A*33:03, |
| | | GHGTPASSPSSSSLPSPMS | B*15:01, B*39:01, B*40:01, |
| | | PTPRQFGRAPVPPFAQPF | B*58:01, C*03:02, C*03:04 |
| | | GAEPEAPWGSSSPSPPPPP | |
| | | PPVFSPTAAFPVPDVFPLPP | |
| | | PPPPLPSPGQASHCSSPAT | |
| | | RFGHSQTPAAFLSALLPSQ | |
| | | PPPAAVNALGLPKGVTPA | |
| | | GFPKKASRTARIASDEEIQG | |
| | | TKDAVIQDLERKLRFKEDLL | |
| | | NNGQPRLTYEERMARRLL | |
| | | GADSATVFNIQEPEEETAN | |
| | | QEYKVSSCEQRLISEIEYRLE | |
| | | RSPVDESGDEVQYGDVPV | |
| | | ENGMAPFFEMKLKHYKIFE | |
| | | GMPVTFTCRVAGNPKPKIY | |
| | | WFKDGKQISPKSDHYTIQR | |
| | | DLDGTCSLHTTASTLDDDG | |
| | | NYTIMAANPQGRISCTGRL | |
| | | MVQAVNQRGRSPRSPSG | |
| | | HPHVRRPRSRSRDSGDEN | |
| | | EPIQERFFRPHFLQAPGDLT | |
| | | VQEGKLCRMDCKVSGLPT | |
| | | PDLSWQLDGKPVRPDSAH | |
| | | KMLVRENGVHSLIIEPVTSR | |
| | | DAGIYTCIATNRAGQNSFS | |
| | | LELVVAAKE | |
| SEQ ID NO: 1881 | ENSG00000129682.9 | MSGKVTKPKEEKDASKVLD | A*02:03, A*02:07, A*24:10, |
| | | DAPPGTQEYIMLRQDSIQS | A*34:01, B*27:04, B*38:02, |
| | | AELKKKESPFRAKCHEIFCC | B*39:01, B*46:01, B*55:02, |
| | | PLKQVHHKENTEPEEPQLK | C*03:02, C*07:02, C*08:01, |
| | | GIVTKLYSRQGYHLQLQAD | C*15:02 |
| | | GTIDGTKDEDSTYTLFNLIP | |
| | | VGLRVVAIQGVQTKLYLA | |
| SEQ ID NO: 1882 | ENSG00000131374.10 | MYHSLSETRHPLQPEEQEV | A*02:03, A*24:02, A*24:07, |
| | | GIDPLSSYSNKSGGDSNKN | A*24:10, A*33:03, B*27:04, |
| | | GRRTSSTLDSEGTFNSYRKE | B*51:01, C*07:02, C*15:02 |
| | | WEELFVNNNYLATIRQKGI | |
| | | NGQLRSSRFRSICWKLFLC | |
| | | VLPQDKSQWISRIEELRAW | |
| | | YSNIKEIHITNPRKVVGQQ | |
| | | DL | |
| SEQ ID NO: 1883 | ENSG00000131620.13 | MWEASGMEERALEELAM | A*02:03, A*24:10, A*33:03, |
| | | EETALDPLLAEAAGAVDGE | B*38:02, B*40:01, C*01:02 |
| | | GAPPGGPSAQAATMRVN | |
| | | EKYSTLPAEDRSVHIINICAI | |
| | | EDIGYLPSEGTLLNSLSVDP | |
| | | DAECKYGLYFRDGRRKVDY | |
| | | ILVYHHKRPSGNRTLVRRV | |
| | | QHSDTPSGARSVKQDHPL | |
| | | PGKGASLDAGSGEPP | |
| SEQ ID NO: 1884 | ENSG00000132005.4 | MATQAYTELQAAPPPSQP | B*15:01, B*58:01, C*03:02, |
| | | PQAPPQAQPQPPPPPPPA | C*03:04, C*03:67, C*12:02, |
| | | APQPPQPPTAAATPQPQY | C*14:02 |
| | | VTELQSPQPQAQPPGGQK | |
| | | QYVTELPAVPAPSQPTGAP | |
| | | TPSPAPQQYIVVTVSEGAM | |
| | | RASETVSEASPGSTASQTG | |
| | | VPTQVVQQVQGTQQRLL | |
| | | VQTSVQAKPGHVSPLQLT | |
| | | NIQVPQQALPTQRLVVQS | |
| | | AAPGSKGGQVSLTVHGTQ | |
| | | QVHSPPEQSPVQANSSSSK | |
| | | TAGAPTGTVPQQLQVHGV | |
| | | QQSVPVTQERSVVQATPQ | |
| | | APKPGPVQPLTVQGLQPV | |
| | | HVAQEVQQLQQVPVPHV | |
| | | YSSQVQYVEGGDASYTASA | |
| | | IRSSTYSYPETPLYTQTASTS | |
| | | YYEAAGTATQVSTPATSQA | |
| | | VASSGS | |
| SEQ ID NO: 1885 | ENSG00000132359.9 | MFGRKRSVSFGGFGWIDK | A*02:03, A*11:01, A*11:02, |
| | | TMLASLKVKKQELANSSDA | A*34:01, B*40:01, C*03:02, |
| | | TLPDRPLSPPLTAPPTMKSS | C*03:04, C*14:02, C*15:02 |
| | | EFFEMLEKMQGIKLEEQKP | |
| | | GPQKNKDDYIPYPSIDEVV | |
| | | EKGGPYPQVILPQFGGYWI | |
| | | EDPENVGTPTSLGSSICEEE | |
| | | EEDNLSPNTFGYKLECKGE | |
| | | ARAYRRHFLGKDHLNFYCT | |
| | | GSSLGNLILSVKCEEAEGIEY | |
| | | LRVILRSKLKTVHERIPLAGL | |
| | | SKLPSVPQIAKAFCDDAVG | |
| | | LRFNPVLYPKASQ | |
| SEQ ID NO: 1886 | ENSG00000134490.9 | MCVRRSLVGLTFCTCYLAS | A*02:03, A*11:01, A*11:02, |
| | | YLTNKYVLSVLKFTYPTLFQ | A*24:02, A*24:07, A*24:10, |
| | | GWQTLIGGLLLHVSWKLG | A*33:03, B*15:01, B*15:27, |
| | | WVEINSSSRSHVLVWLPAS | B*58:01, C*03:02, C*03:04, |
| | | VLFVGIIYAGSRALSRLAIPV | C*12:02 |
| | | FLTLHNVAEVIICGYQKCFQ | |
| | | KEKTSPAKICSALLLLAAAG | |
| | | CLPFNDSQFNPDGYFWAII | |
| | | HLLCVGAYKILQKSQKPSAL | |
| | | SDIDQQYLNYIFSVVLLAFA | |
| | | SHPTGDLFSVLDFPFLYFYR | |
| | | FHGSCCASGFLGFFLMFST | |
| | | VKLKNLLAPGQCAAWIFFA | |
| | | KIITAGLSILLFDAILTSATTG | |
| | | CLLLGALGEALLVFSERKSS | |
| SEQ ID NO: 1887 | ENSG00000135093.8 | MLSSRAEAAMTAADRAIQ | A*02:03, A*02:07, A*11:01, |
| | | RFLRTGAAVRYKVMKNW | A*11:02, A*24:02, A*24:07, |
| | | GVIGGIAAALAAGIYVIWG | A*24:10, B*15:21, B*27:04, |
| | | PITERKKRRKGLVPGLVNL | B*38:02, B*39:01, B*40:01, |
| | | GNTCFMNSLLQGLSACPA | B*51:01, B*58:01, C*03:02, |
| | | FIRWLEEFTSQYSRDQKEP | C*07:02, C*14:02, C*15:02 |
| | | PSHQYLSLTLLHLLKALSCQ | |
| | | EVTDDEVLDASCLLDVLRM | |
| | | YRWQISSFEEQDAHELFHV | |
| | | ITSSLEDERDRQPRVTHLFD | |
| | | VHSLEQQSEITPKQITCRTR | |
| | | GSPHPTSNHWKSQHPFHG | |
| | | RLTSN | |
| SEQ ID NO: 1888 | ENSG00000136231.9 | MNKLYIGNLSENAAPSDLE | A*02:03, A*11:01, A*11:02, |
| | | SIFKDAKIPVSGPFLVKTGY | A*24:10, A*33:03, A*34:01, |
| | | AFVDCPDESWALKAIEALS | B*15:01, B*15:27, C*03:02, |
| | | GKIELHGKPIEVEHSVPKRQ | C*03:04, C*14:02 |
| | | RIRKLQIRNIPPHLQWEVLD | |
| | | SLLVQYGVVESCEQVNTDS | |
| | | ETAVVNVTYSSKDQARQA | |
| | | LDKLNGFQLENFTLKVAYIP | |
| | | DEMAAQQNPLQQPRGRR | |
| | | GLGQRGSSRQGSPGSVSK | |
| | | QKPCDLPLRLLVPTQFVGAI | |
| | | IGKEGATIRNITKQTQSKID | |
| | | VHRKENAGAAEKSITILSTP | |
| | | EGTSAACKSILEIMHKEAQ | |
| | | DIKFTEEIPLKILAHNNFVG | |
| | | RLIGKEGRNLKKIEQDTDTK | |
| | | ITISPLQELTLYNPERTITVK | |
| | | GNVETCAKAEEEIMKKIRE | |
| | | SYENDIASMNLQAHLIPGL | |
| | | NLNALGLFPPTSGMPPPTS | |
| | | GPPSAMTPPYPQFEQSETE | |
| | | TVHLFIPALSVGAIIGKQGQ | |
| | | HIKQLSRFAGASIKIAPAEA | |
| | | PDAKVRMVIITGPPEAQFK | |
| | | AQGRIYGKIKEENFVSPKEE | |
| | | VKLEAHIRVPSFAAGRVIGK | |
| | | GGKTVNELQNLSSAEVVVP | |
| | | RDQTPDENDQVVVKITGH | |
| | | FYACQVAQRKIQEILTQVK | |
| | | QHQQQKALQSGPPQSRRK | |
| SEQ ID NO: 1889 | ENSG00000136848.12 | MEPDSLLDQDDSYESPQE | A*02:03 |
| | | RPGSRRSLPGSLSEKSPSM | |
| | | EPSAATPFRVTGFLSRRLKG | |
| | | SIKRTKSQPKLDRNHSFRHI | |
| SEQ ID NO: 1890 | ENSG00000137203.6 | MLWKLTDNIKYEDCEDRH | A*02:03, A*11:01, A*11:02, |
| | | DGTSNGTARLPQLGTVGQ | A*24:02, A*24:10, A*33:03, |
| | | SPYTSAPPLSHTPNADFQP | B*39:01, C*14:02 |
| | | PYFPPPYQPIYPQSQDPYS | |
| | | HVNDPYSLNPLHAQPQPQ | |
| | | HPGWPGQRQSQESGLLHT | |
| | | HRGLPHQLSGLDPRRDYRR | |
| | | HEDLLHGPHALSSGLGDLSI | |
| | | HSLPHAIEEVPHVEDPGINI | |
| | | PDQTVIKKGPVSLSKSNSN | |
| | | AVSAIPINKDNLFGGVVNP | |
| | | NEVFCSVPGRLSLLSSTSK | |
| SEQ ID NO: 1891 | ENSG00000137474.15 | MVILQQGDHVWMDLRLG | A*02:03, A*11:01, A*11:02, |
| | | QEFDVPIGAVVKLCDSGQV | A*24:02, A*24:07, A*24:10, |
| | | QVVDDEDNEHWISPQNA | A*33:03, B*15:01, B*39:01, |
| | | THIKPMHPTSVHGVEDMI | B*40:01, B*55:02, B*58:01, |
| | | RLGDLNEAGILRNLLIRYRD | C*03:02, C*03:04, C*03:67, |
| | | HLIYTYTGSILVAVNPYQLLS | C*07:02, C*12:02, C*14:02, |
| | | IYSPEHIRQYTNKKIGEMPP | C*15:02 |
| | | HIFAIADNCYFNMKRNSRD | |
| | | QCCIISGESGAGKTESTKLIL | |
| | | QFLAAISGQHSWIEQQVLE | |
| | | ATPILEAFGNAKTIRNDNSS | |
| | | RFGKYIDIHFNKRGAIEGAK | |
| | | IEQYLLEKSRVCRQALDERN | |
| | | YHVFYCMLEGMSEDQKKK | |
| | | LGLGQASDYNYLAMGNCI | |
| | | TCEGRVDSQEYANIRSAM | |
| | | KVLMFTDTENWEISKLLAA | |
| | | ILHLGNLQYEARTFENLDA | |
| | | CEVLFSPSLATAASLLEVNP | |
| | | PDLMSCLTSRTLITRGETVS | |
| | | TPLSREQALDVRDAFVKGI | |
| | | YGRLFVWIVDKINAAIYKPP | |
| | | SQDVKNSRRSIGLLDIFGFE | |
| | | NFAVNSFEQLCINFANEHL | |
| | | QQFFVRHVFKLEQEEYDLE | |
| | | SIDWLHIEFTDNQDALDMI | |
| | | ANKPMNIISLIDEESKFPKG | |
| | | TDTTMLHKLNSQHKLNAN | |
| | | YIPPKNNHETQFGINHFAG | |
| | | IVYYETQGFLEKNRDTLHG | |
| | | DIIQLVHSSRNKFIKQIFQA | |
| | | DVAMGAETRKRSPTLSSQF | |
| | | KRSLELLMRTLGACQPFFV | |
| | | RCIKPNEFKKPMLFDRHLC | |
| | | VRQLRYSGMMETIRIRRAG | |
| | | YPIRYSFVEFVERYRVLLPG | |
| | | VKPAYKQGDLRGTCQRMA | |
| | | EAVLGTHDDWQIGKTKIFL | |
| | | KDHHDMLLEVERDKAITD | |
| | | RVILLQKVIRGFKDRSNFLK | |
| | | LKNAATLIQRHWRGHNCR | |
| | | KNYGLMRLGFLRLQALHRS | |
| | | RKLHQQYRLARQRIIQFQA | |
| | | RCRAYLVRKAFRHRLWAVL | |
| | | TVQAYARGMIARRLHQRL | |
| | | RAEYLWRLEAEKMRLAEEE | |
| | | KLRKEMSAKKAKEEAERKH | |
| | | QERLAQLAREDAERELKEK | |
| | | EAARRKKELLEQMERARH | |
| | | EPVNHSDMVDKMFGFLG | |
| | | TSGGLPGQEGQAPSGFED | |
| | | LERGRREMVEEDLDAALPL | |
| | | PDEDEEDLSEYKFAKFAATY | |
| | | FQGTTTHSYTRRPLKQPLLY | |
| | | HDDEGDQLAALAVWITILR | |
| | | FMGDLPEPKYHTAMSDGS | |
| | | EKIPVMTKIYETLGKKTYKR | |
| | | ELQALQGEGEAQLPEGQK | |
| | | KSSVRHKLVHLTLKKKSKLT | |
| | | EEVTKRLHDGESTVQGNS | |
| | | MLEDRPTSNLEKLHFIIGNG | |
| | | ILRPALRDEIYCQISKQLTH | |
| | | NPSKSSYARGWILVSLCVG | |
| | | CFAPSEKFVKYLRNFIHGGP | |
| | | PGYAPYCEERLRRTFVNGT | |
| | | RTQPPSWLELQATKSKKPI | |
| | | MLPVTFMDGTTKTLLTDSA | |
| | | TTAKELCNALADKISLKDRF | |
| | | GFSLYIALFD | |
| SEQ ID NO: 1892 | ENSG00000138075.7 | MGDLSSLTPGGSMGLQV | A*02:03, A*02:07, A*11:01, |
| | | NRGSQSSLEGAPATAPEPH | A*11:02, A*24:02, A*24:07, |
| | | SLGILHASYSVSHRVRPW | A*24:10, A*33:03, A*34:01, |
| | | WDITSCRQQWTRQILKDV | B*15:01, B*15:21, B*15:27, |
| | | SLYVESGQIMCILGSSGSGK | B*27:04, B*38:02, B*39:01, |
| | | TTLLDAMSGRLGRAGTFLG | B*40:01, B*40:06, B*46:01, |
| | | EVYVNGRALRREQFQDCFS | B*55:02, B*58:01, C*03:02, |
| | | YVLQSDTLLSSLTVRETLHY | C*03:04, C*03:67, C*04:01, |
| | | TALLAIRRGNPGSFQKKVE | C*04:03, C*07:02, C*08:01, |
| | | AVMAELSLSHVADRLIGNY | C*12:02, C*14:02, C*15:02 |
| | | SLGGISTGERRRVSIAAQLL | |
| | | QDPKVMLFDEPTTGLDCM | |
| | | TANQIVVLLVELARRNRIVV | |
| | | LTIHQPRSELFQLFDKIAILS | |
| | | FGELIFCGTPAEMLDFFND | |
| | | CGYPCPEHSNPFDFY | |
| SEQ ID NO: 1893 | ENSG00000142185.12 | MEPSALRKAGSEQEEGFE | A*02:03, A*11:01, A*11:02, |
| | | GLPRRVTDLGMVSNLRRS | A*24:02, A*24:07, A*24:10, |
| | | NSSLFKSWRLQCPFGNND | A*33:03, A*34:01, B*15:01, |
| | | KQESLSSWIPENIKKKECVY | B*15:27, B*39:01, B*40:01, |
| | | FVESSKLSDAGKVVCQCGY | B*58:01, C*03:02, C*03:04, |
| | | THEQHLEEATKPHTFQGT | C*12:02, C*14:02, C*15:02 |
| | | QWDPKKHVQEMPTDAFG | |
| | | DIVFTGLSQKVKKYVRVSQ | |
| | | DTPSSVIYHLMTQHWGLD | |
| | | VPNLLISVTGGAKNFNMKP | |
| | | RLKSIFRRGLVKVAQTTGA | |
| | | WIITGGSHTGVMKQVGEA | |
| | | VRDFSLSSSYKEGELITIGVA | |
| | | TWGTVHRREGLIHPTGSFP | |
| | | AEYILDEDGQGNLTCLDSN | |
| | | HSHFILVDDGTHGQYGVEI | |
| | | PLRTRLEKFISEQTKERGGV | |
| | | AIKIPIVCVVLEGGPGTLHTI | |
| | | DNATTNGTPCVVVEGSGR | |
| | | VADVIAQVANLPVSDITISLI | |
| | | QQKLSVFFQEMFETFTESRI | |
| | | VEWTKKIQDIVRRRQLLTV | |
| | | FREGKDGQQDVDVAILQA | |
| | | LLKASRSQDHFGHENWDH | |
| | | QLKLAVAWNRVDIARSEIF | |
| | | MDEWQWKPSDLHPTMT | |
| | | AALISNKPEFVKLFLENGVQ | |
| | | LKEFVTWDTLLYLYENLDPS | |
| | | CLFHSKLQMHHVAQVLRE | |
| | | LLGDFTQPLYPRPRHNDRL | |
| | | RLLLPVPHVKLNVQGVSLR | |
| | | SLYKRSSGHVTFTMDPIRD | |
| | | LLIWAIVQNRRELAGIIWA | |
| | | QSQDCIAAALACSKILKELS | |
| | | KEEEDTDSSEEMLALAEEY | |
| | | EHRAIGVFTECYRKDEERA | |
| | | QKLLTRVSEAWGKTTCLQL | |
| | | ALEAKDMKFVSHGGIQAFL | |
| | | TKVWWGQLSVDNGLWR | |
| | | VTLCMLAFPLLLTGLISFREK | |
| | | RLQDVGTPAARARAFFTAP | |
| | | VVVFHLNILSYFAFLCLFAY | |
| | | VLMVDFQPVPSWCECAIY | |
| | | LWLFSLVCEEMRQLFYDPD | |
| | | ECGLMKKAALYFSDFWNK | |
| | | LDVGAILLFVAGLTCRLIPA | |
| | | TLYPGRVILSLDFILFCLRLM | |
| | | HIFTISKTLGPKIIIVKRMMK | |
| | | DVFFFLFLLAVWVVSFGVA | |
| | | KQAILIHNERRVDWLFRGA | |
| | | VYHSYLTIFGQIPGYIDGVN | |
| | | FNPEHCSPNGTDPYKPKCP | |
| | | ESDATQQRPAFPEWLTVLL | |
| | | LCLYLLFTNILLLNLLIAMFN | |
| | | YTFQQVQEHTDQIWKFQR | |
| | | HDLIEEYHGRPAAPPPFILL | |
| | | SHLQLFIKRVVLKTPAKRHK | |
| | | QLKNKLEKNEEAALLSWEI | |
| | | YLKENYLQNRQFQQKQRP | |
| | | EQKIEDISNKVDAMVDLLD | |
| | | LDPLKRSGSMEQRLASLEE | |
| | | QVAQTAQALHWIVRTLRA | |
| | | SGFSSEADVPTLASQKAAE | |
| | | EPDAEPGGRKKTEEPGDSY | |
| | | HVNARHLLYPNCPVTRFPV | |
| | | PNEKVPWETEFLIYDPPFYT | |
| | | AERKDAAAMDPMGENP | |
| | | MGRTGLRGRGSLSCFGPN | |
| | | HTLYPMVTRWRRNEDGAI | |
| | | CRKSIKKMLEVLVVKLPLSE | |
| | | HWALPGGSREPGEMLPRK | |
| | | LKRILRQEHWPSFENLLKC | |
| | | GMEVYKGYMDDPRNTDN | |
| | | AWIETVAVSVHFQDQNDV | |
| | | ELNRLNSNLHACDSGASIR | |
| | | WQVVDRRIPLYANHKTLL | |
| | | QKAAAEFGAHY | |
| SEQ ID NO: 1894 | ENSG00000142235.4 | MRQVLWLCNVCVTARETR | A*02:03, A*33:03, B*15:01, |
| | | HHLHLPAILDKMPAPGALI | B*39:01, B*40:01, C*03:02, |
| | | LLAAVSASGCLASPAHPDG | C*03:04 |
| | | FALGRAPLAPPYAVVLISCS | |
| | | GLLAFIFLLLTCLCCKRGDV | |
| | | GFKEFENPEGEDCSGEYTP | |
| | | PAEETSSSQSLPDVYILPLAE | |
| | | VSLPMPAPQPSHSDMTTP | |
| | | LGLSRQHLSYLQEIGSGWF | |
| | | GKVILGEIFSDYTPAQVVVK | |
| | | ELRASAGPLEQRKFISEAQP | |
| | | YRSLQHPNVLQCLGLCVET | |
| | | LPFLLIMEFCQLGDLKRYLR | |
| | | AQRPPEGLSPELPPRDLRTL | |
| | | QRMGLEIARGLAHLHSHN | |
| | | YV | |
| SEQ ID NO: 1895 | ENSG00000142661.14 | MTLPHSLGGAGDPRPPQA | A*02:03, A*11:01, A*11:02, |
| | | MEVHRLEHRQEEEQKEER | A*24:02, A*24:07, A*24:10, |
| | | QHSLRMGSSVRRRTFRSSE | A*33:03, B*15:01, B*15:27, |
| | | EEHEFSAADYALAAALALT | B*39:01, B*40:01, B*58:01, |
| | | ASSELSWEAQLRRQTSAVE | C*03:02, C*03:04, C*03:67, |
| | | LEERGQKRVGFGNDWERT | C*07:02, C*08:01, C*12:02, |
| | | EIAFLQTHRLLRQRRDWKT | C*14:02 |
| | | LRRRTEEKVQEAKELRELCY | |
| | | GRGPWFWIPLRSHAVWE | |
| | | HTTVLLTCTVQASPPPQVT | |
| | | WYKNDTRIDPRLFRAGKYR | |
| | | ITNNYGLLSLEIRRCAIEDSA | |
| | | TYTVRVKNAHGQASSFAK | |
| | | VLVRTYLGKDAGFDSEIFKR | |
| | | STFGPSVEFTSVLKPVFARE | |
| | | KEPFSLSCLFSEDVLDAESIQ | |
| | | WFRDGSLLRSSRRRKILYTD | |
| | | RQASLKVSCTYKEDEGLYM | |
| | | VRVPSPFGPREQSTYVLVR | |
| | | DAEAENPGAPGSPLNVRCL | |
| | | DVNRDCLILTWAPPSDTRG | |
| | | NPITAYTIERCQGESGEWIA | |
| | | CHEAPGGTCRCPIQGLVEG | |
| | | QSYRFRVRAISRVGSSVPSK | |
| | | ASELVVMGDHDAARRKTE | |
| | | IPFDLGNKITISTDAFEDTVT | |
| | | IPSPPTNVHASEIREAYVVL | |
| | | AWEEPSPRDRAPLTYSLEK | |
| | | SVIGSGTWEAISSESPVRSP | |
| | | RFAVLDLEKKKSYVFRVRA | |
| | | MNQYGLSDPSEPSEPIALR | |
| | | GPPATLPPPAQVQAFRDT | |
| | | QTSVSLTWDPVKDPELLGY | |
| | | YIYSRKVGTSEWQTVNNKP | |
| | | IQGTRFTVPGLRTGKEYEFC | |
| | | VRSVSEAGVGESSAATEPIR | |
| | | VKQALATPSAPYGFALLNC | |
| | | GKNEMVIGWKPPKRRGG | |
| | | GKILGYFLDQHDSEELDWH | |
| | | AVNQQPIPTRVCKVSDLHE | |
| | | GHFYEFRARAANWAGVG | |
| | | ELSAPSSLFECKEWTMPQP | |
| | | GPPYDVRASEVRATSLVLQ | |
| | | WEPPLYMGAGPVTGYHVS | |
| | | FQEEGSEQWKPVTPGPISG | |
| | | THLRVSDLQPGKSYVFQVQ | |
| | | AMNSAGLGQPSMPTDPV | |
| | | LLEDKPGAHEIEVGVDEEG | |
| | | FIYLAFEAPEAPDSSEFQWS | |
| | | KDYKGPLDPQRVKIEDKVN | |
| | | KSKVILKEPGLEDLGTYSVIV | |
| | | TDADEDISASHTLTEEELEK | |
| | | LKKLSHEIRNPVIKLISGWNI | |
| | | DILERGEVRLWLEVEKLSPA | |
| | | AELHLIFNNKEIFSSPNRKIN | |
| | | FDREKGLVEVIIQNLSEEDK | |
| | | GSYTAQLQDGKAKNQITLT | |
| | | LVDDDFDKLLRKADAKRRD | |
| | | WKRKQGPYFERPLQWKVT | |
| | | EDCQVQLTCKVTNTKKETR | |
| | | FQWFFQRAEMPDGQYDP | |
| | | ETGTGLLCIEELSKKDKGIYR | |
| | | AMVSDDRGEDDTILDLTG | |
| | | DALDAIFTELGRIGALSATP | |
| | | LKIQGTEEGIRIFSKVKYYNV | |
| | | EYMKTTWFHKDKRLESGD | |
| | | RIRTGTTLDEIWLHILDPKD | |
| | | SDKGKYTLEIAAGKEVRQLS | |
| | | TDLSGQAFEDAMAEHQRL | |
| | | KTLAIIEKNRAKVVRGLPDV | |
| | | ATIMEDKTLCLTCIVSGDPT | |
| | | PEISWLKNDQPVTFLDRYR | |
| | | MEVRGTEVTITIEKVNSEDS | |
| | | GRYGVFVKNKYGSETGQV | |
| | | TISVFKHGDEPKELKSM | |
| SEQ ID NO: 1896 | ENSG00000143669.9 | MSTDSNSLAREFLTDVNRL | A*02:03, A*11:01, A*11:02, |
| | | CNAVVQRVEAREEEEEETH | A*24:02, A*24:07, A*24:10, |
| | | MATLGQYLVHGRGFLLLTK | A*33:03, A*34:01, B*15:01, |
| | | LNSIIDQALTCREELLTLLLSL | B*15:27, B*39:01, B*40:01, |
| | | LPLVWKIPVQEEKATDFNL | B*55:02, B*58:01, C*03:02, |
| | | PLSADIILTKEKNSSSQRST | C*03:04, C*03:67, C*07:02, |
| | | QEKLHLEGSALSSQVSAKV | C*12:02, C*14:02, C*15:02 |
| | | NVFRKSRRQRKITHRYSVR | |
| | | DARKTQLSTSDSEANSDEK | |
| | | GIAMNKHRRPHLLHHFLTS | |
| | | FPKQDHPKAKLDRLATKEQ | |
| | | TPPDAMALENSREIIPRQG | |
| | | SNTDILSEPAALSVISNMN | |
| | | NSPFDLCHVLLSLLEKVCKF | |
| | | DVTLNHNSPLAASVVPTLT | |
| | | EFLAGFGDCCSLSDNLESR | |
| | | VVSAGWTEEPVALIQRML | |
| | | FRTVLHLLSVDVSTAEMM | |
| | | PENLRKNLTELLRAALKIRIC | |
| | | LEKQPDPFAPRQKKTLQEV | |
| | | QEDFVFSKYRHRALLLPELL | |
| | | EGVLQILICCLQSAASNPFY | |
| | | FSQAMDLVQEFIQHHGFN | |
| | | LFETAVLQMEWLVLRDGV | |
| | | PPEASEHLKALINSVMKIM | |
| | | STVKKVKSEQLHHSMCTRK | |
| | | RHRRCEYSHFMHHHRDLS | |
| | | GLLVSAFKNQVSKNPFEET | |
| | | ADGDVYYPERCCCIAVCAH | |
| | | QCLRLLQQASLSSTCVQILS | |
| | | GVHNIGICCCMDPKSVIIPL | |
| | | LHAFKLPALKNFQQHILNIL | |
| | | NKLILDQLGGAEISPKIKKA | |
| | | ACNICTVDSDQLAQLEETL | |
| | | QGNLCDAELSSSLSSPSYRF | |
| | | QGILPSSGSEDLLWKWDAL | |
| | | KAYQNFVFEEDRLHSIQIA | |
| | | NHICNLIQKGNIVVQWKLY | |
| | | NYIFNPVLQRGVELAHHCQ | |
| | | HLSVTSAQSHVCSHHNQC | |
| | | LPQDVLQIYVKTLPILLKSRV | |
| | | IRDLFLSCNGVSQIIELNCLN | |
| | | GIRSHSLKAFETLIISLGEQQ | |
| | | KDASVPDIDGIDIEQKELSS | |
| | | VHVGTSFHHQQAYSDSPQ | |
| | | SLSKFYAGLKEAYPKRRKTV | |
| | | NQDVHINTINLFLCVAFLCV | |
| | | SKEAESDRESANDSEDTSG | |
| | | YDSTASEPLSHMLPCISLES | |
| | | LVLPSPEHMHQAADIWS | |
| | | MCRWIYMLSSVFQKQFYR | |
| | | LGGFRVCHKLIFMIIQKLFR | |
| | | SHKEEQGKKEGDTSVNEN | |
| | | QDLNRISQPKRTMKEDLLS | |
| | | LAIKSDPIPSELGSLKKSADS | |
| | | LGKLELQHISSINVEEVSAT | |
| | | EAAPEEAKLFTSQESETSLQ | |
| | | SIRLLEALLAICLHGARTSQ | |
| | | QKMELELPNQNLSVESILFE | |
| | | MRDHLSQSKVIETQLAKPL | |
| | | FDALLRVALGNYSADFEHN | |
| | | DAMTEKSHQSAEELSSQP | |
| | | GDFSEEAEDSQCCSFKLLVE | |
| | | EEGYEADSESNPEDGETQD | |
| | | DGVDLKSETEGFSASSSPN | |
| | | DLLENLTQGEIIYPEICMLEL | |
| | | NLLSASKAKLDVLAHVFESF | |
| | | LKIIRQKEKNVFLLMQQGT | |
| | | VKNLLGGFLSILTQDDSDF | |
| | | QACQRVLVDLLVSLMSSRT | |
| | | CSEELTLLLRIFLEKSPCTKIL | |
| | | LLGILKIIESDTTMSPSQYLT | |
| | | FPLLHAPNLSNGVSSQKYP | |
| | | GILNSKAMGLLRRARVSRS | |
| | | KKEADRESFPHRLLSSWHI | |
| | | APVHLPLLGQNCWPHLSE | |
| | | GFSVSLWFNVECIHEAEST | |
| | | TEKGKKIKKRNKSLILPDSSF | |
| | | DGTESDRPEGAEYINPGER | |
| | | LIEEGCIHIISLGSKALMIQV | |
| | | WADPHNATLIFRVCMDSN | |
| | | DDMKAVLLAQVESQENIFL | |
| | | PSKWQHLVLTYLQQPQGK | |
| | | RRIHGKISIWVSGQRKPDV | |
| | | TLDFMLPRKTSLSSDSNKTF | |
| | | CMIGHCLSSQEEFLQLAGK | |
| | | WDLGNLLLFNGAKVGSQE | |
| | | AFYLYACGPNHTSVMPCK | |
| | | YGKPVNDYSKYINKEILRCE | |
| | | QIRELFMTKKDVDIGLLIESL | |
| | | SVVYTTYCPAQYTIYEPVIRL | |
| | | KGQMKTQLSQRPFSSKEV | |
| | | QSILLEPHHLKNLQPTEYKT | |
| | | IQGILHEIGGTGIFVFLFARV | |
| | | VELSSCEETQALALRVILSLI | |
| | | KYNQQRVHELENCNGLSM | |
| | | IHQVLIKQKCIVGFYILKTLL | |
| | | EGCCGEDIIYMNENGEFKL | |
| | | DVDSNAIIQDVKLLEELLLD | |
| | | WKIWSKAEQGVWETLLAA | |
| | | LEVLIRADHHQQMFNIKQL | |
| | | LKAQVVHHFLLTCQVLQEY | |
| | | KEGQLTPMPREVCRSFVKII | |
| | | AEVLGSPPDLELLTIIFNFLL | |
| | | AVHPPTNTYVCHNPTNFYF | |
| | | SLHIDGKIFQEKVRSIMYLR | |
| | | HSSSGGRSLMSPGFMVISP | |
| | | SGFTASPYEGENSSNIIPQQ | |
| | | MAAHMLRSRSLPAFPTSSL | |
| | | LTQSQKLTGSLGCSIDRLQ | |
| | | NIADTYVATQSKKQNSLGS | |
| | | SDTLKKGKEDAFISSCESAK | |
| | | TVCEMEAVLSAQVSVSDV | |
| | | PKGVLGFPVVKADHKQLG | |
| | | AEPRSEDDSPGDESCPRRP | |
| | | DYLKGLASFQRSHSTIASLG | |
| | | LAFPSQNGSAAVGRWPSL | |
| | | VDRNTDDWENFAYSLGYE | |
| | | PNYNRTASAHSVTEDCLVP | |
| | | ICCGLYELLSGVLLILPDVLL | |
| | | EDVMDKLIQADTLLVLVNH | |
| | | PSPAIQQGVIKLLDAYFARA | |
| | | SKEQKDKFLKNRGFSLLAN | |
| | | QLYLHRGTQELLECFIEMFF | |
| | | GRHIGLDEEFDLEDVRNM | |
| | | GLFQKWSVIPILGLIETSLYD | |
| | | NILLHNALLLLLQILNSCSKV | |
| | | ADMLLDNGLLYVLCNTVA | |
| | | ALNGLEKNIPMSEYKLLAC | |
| | | DIQQLFIAVTIHACSSSGSQ | |
| | | YFRVIEDLIVMLGYLQNSK | |
| | | NKRTQNMAVALQLRVLQ | |
| | | AAMEFIRTTANHDSENLTD | |
| | | SLQSPSAPHHAVVQKRKSI | |
| | | AGPRKFPLAQTESLLMKM | |
| | | RSVANDELHVMMQRRMS | |
| | | QENPSQATETELAQRLQRL | |
| | | TVLAVNRIIYQEFNSDIIDIL | |
| | | RTPENVTQSKTSVFQTEISE | |
| | | ENIHHEQSSVFNPFQKEIFT | |
| | | YLVEGFKVSIGSSKASGSKQ | |
| | | QWTKILWSCKETFRMQLG | |
| | | RLLVHILSPAHAAQERKQIF | |
| | | EIVHEPNHQEILRDCLSPSL | |
| | | QHGAKLVLYLSELIHNHQG | |
| | | ELTEEELGTAELLMNALKLC | |
| | | GHKCIPPSASTKADLIKMIK | |
| | | EEQKKYETEEGVNKAAWQ | |
| | | KTVNNNQQSLFQRLDSKS | |
| | | KDISKIAADITQAVSLSQGN | |
| | | ERKKVIQHIRGMYKVDLSA | |
| | | SRHWQELIQQLTHDRAV | |
| | | WYDPIYYPTSWQLDPTEG | |
| | | PNRERRRLQRCYLTIPNKYL | |
| | | LRDRQKSEDVVKPPLSYLFE | |
| | | DKTHSSFSSTVKDKAASESI | |
| | | RVNRRCISVAPSRETAGELL | |
| | | LGKCGMYFVEDNASDTVE | |
| | | SSSLQGELEPASFSWTYEEI | |
| | | KEVHKRWWQLRDNAVEIF | |
| | | LTNGRTLLLAFDNTKVRDD | |
| | | VYHNILTNNLPNLLEYGNIT | |
| | | ALTNLWYTGQITNFEYLTH | |
| | | LNKHAGRSFNDLMQYPVF | |
| | | PFILADYVSETLDLNDLLIYR | |
| | | NLSKPIAVQYKEKEDRYVD | |
| | | TYKYLEEEYRKGAREDDPM | |
| | | PPVQPYHYGSHYSNSGTVL | |
| | | HFLVRMPPFTKMFLAYQD | |
| | | QSFDIPDRTFHSTNTTWRL | |
| | | SSFESMTDVKELIPEFFYLPE | |
| | | FLVNREGFDFGVRQNGER | |
| | | VNHVNLPPWARNDPRLFI | |
| | | LIHRQALESDYVSQNICQW | |
| | | IDLVFGYKQKGKASVQAIN | |
| | | VFHPATYFGMDVSAVEDP | |
| | | VQRRALETMIKTYGQTPR | |
| | | QLFHMAHVSRPGAKLNIE | |
| | | GELPAAVGLLVQFAFRETR | |
| | | EQVKEITYPSPLSWIKGLK | |
| | | WGEYVGSPSAPVPVVCFS | |
| | | QPHGERFGSLQALPTRAIC | |
| | | GLSRNFCLLMTYSKEQGVR | |
| | | SMNSTDIQWSAILSWGYA | |
| | | DNILRLKSKQSEPPVNFIQS | |
| | | SQQYQVTSCAWVPDSCQL | |
| | | FTGSKCGVITAYTNRFTSST | |
| | | PSEIEMETQIHLYGHTEEIT | |
| | | SLFVCKPYSILISVSRDGTCII | |
| | | WDLNRLCYVQSLAGHKSP | |
| | | VTAVSASETSGDIATVCDS | |
| | | AGGGSDLRLWTVNGDLV | |
| | | GHVHCREIICSVAFSNQPE | |
| | | GVSINVIAGGLENGIVRLW | |
| | | STWDLKPVREITFPKSNKPI | |
| | | ISLTFSCDGHHLYTANSDGT | |
| | | VIAWCRKDQQRLKQPMFY | |
| | | SFLSSYAAG | |
| SEQ ID NO: 1897 | ENSG00000143882.5 | MSEFWLISAPGDKENLQAL | A*02:03, A*11:01, A*11:02, |
| | | ERMNTVTSKSNLSYNTKFA | A*33:03, B*58:01, C*03:02, |
| | | IPDFKVGTLDSLVGLSDELG | C*03:04 |
| | | KLDTFAESLIRRMAQSVVE | |
| | | VMEDSKGKVQEHLLANGV | |
| | | DLTSFVTHFEWD | |
| SEQ ID NO: 1898 | ENSG00000145214.9 | MAAAAEPGARAWLGGGS | A*02:03, A*11:01, A*11:02, |
| | | PRPGSPACSPVLGSGGRAR | A*33:03, B*15:01, B*39:01, |
| | | PGPGPGPGPERAGVRAPG | B*40:01, C*03:02, C*03:04 |
| | | PAAAPGHSFRKVTLTKPTF | |
| | | CHLCSDFIWGLAGFLCDVC | |
| | | NFMSHEKCLKHVRIPCTSV | |
| | | APSLVRVPVAHCFGPRGLH | |
| | | KRKFCAVCRKVLEAPALHC | |
| | | EVCELHLHPDCVPFACSDC | |
| | | RQCHQDGHQDHDTHHH | |
| | | HWREGNLPSGARCEVCRK | |
| | | TCGSSDVLAGVRCEWCGV | |
| | | QAHSLCSAALAPECGFGRL | |
| | | RSLVLPPACVRLLPGGFSKT | |
| | | QSFRIVEAAEPGEGGDGA | |
| | | DGSAAVGPGRETQATPES | |
| | | GKQTLKIFDGDDAVRRSQF | |
| | | RLVTVSRLAGAEEVLEAALR | |
| | | AHHIPEDPGHLELCRLPPSS | |
| | | QACDAWAGGKAGSAVISE | |
| | | EGRSPGSGEATPEAWVIRA | |
| | | LPRAQEVLKIYPGWLKVGV | |
| | | AYVSVRVTPKSTARSVVLE | |
| | | VLPLLGRQAESPESFQLVEV | |
| | | AMGCRHVQRTMLMDEQ | |
| | | PLLDRLQDIRQMSVRQVS | |
| | | QTRFYVAESRDVAPHVSLF | |
| | | VGGLPPGLSPEEYSSLLHEA | |
| | | GATKATVVSVSHIYSSQGA | |
| | | VVLDVACFAEAERLYMLLK | |
| | | DMAVRGRLLTALVLPDLLH | |
| | | AKLPPDSCPLLVFVNPKSG | |
| | | GLKGRDLLCSFRKLLNPHQ | |
| | | VFDLTNGGPLPGLHLFSQV | |
| | | PCFRVLVCGGDGTVGWVL | |
| | | GALEETRYRLACPEPSVAIL | |
| | | PLGTGNDLGRVLRWGAGY | |
| | | SGEDPFSVLLSVDEADAVL | |
| | | MDRWTILLDAHEAGSAEN | |
| | | DTADAEP | |
| SEQ ID NO: 1899 | ENSG00000151025.9 | MGAMAYPLLLCLLLAQLGL | A*02:03, A*02:07, A*11:01, |
| | | GAVGASRDPQGRPDSPRE | A*11:02, A*24:02, A*24:07, |
| | | RTPKGKPHAQQPGRASAS | A*24:10, A*33:03, B*15:01, |
| | | DSSAPWSRSTDGTILAQKL | B*39:01, B*40:01, B*55:02, |
| | | AEEVPMDVASYLYTGDSH | B*58:01, C*03:02, C*03:04, |
| | | QLKRANCSGRYELAGLPGK | C*03:67, C*07:02, C*12:02, |
| | | WPALASAHPSLHRALDTLT | C*14:02 |
| | | HATNFLNVMLQSNKSREQ | |
| | | NLQDDLDWYQALVWSLLE | |
| | | GEPSISRAAITFSTDSLSAPA | |
| | | PQVFLQATREESRILLQDLS | |
| | | SSAPHLANATLETEWFHGL | |
| | | RRKWRPHLHRRGPNQGP | |
| | | RGLGHSWRRKDGLGGDKS | |
| | | HFKWSPPYLECENGSYKPG | |
| | | WLVTLSSAIYGLQPNLVPEF | |
| | | RGVMKVDINLQKVDIDQC | |
| | | SSDGWFSGTHKCHLNNSE | |
| | | CMPIKGLGFVLGAYECICK | |
| | | AGFYHPGVLPVNNFRRRG | |
| | | PDQHISGSTKDVSEEAYVC | |
| | | LPCREGCPFCADDSPCFVQ | |
| | | EDKYLRLAIISFQALCMLLD | |
| | | FVSMLVVYHFRKAKSIRAS | |
| | | GLILLETILFGSLLLYFPVVILY | |
| | | FEPSTFRCILLRWARLLGFA | |
| | | TVYGTVTLKLHRVLKVFLSR | |
| | | TAQRIPYMTGGRVMRML | |
| | | AVILLVVFWFLIGWTSSVC | |
| | | QNLEKQISLIGQGKTSDHLI | |
| | | FNMCLIDRWDYMTAVAEF | |
| | | LFLLWGVYLCYAVRTVPSA | |
| | | FHEPRYMAVAVHNELIISAI | |
| | | FHTIRFVLASRLQSDWML | |
| | | MLYFAHTHLTVTVTIGLLLI | |
| | | PKFSHSSNNPRDDIATEAY | |
| | | EDELDMGRSGSYLNSSINS | |
| | | AWSEHSLDPEDIRDELKKL | |
| | | YAQLEIYKRKKMITNNPHL | |
| | | QKKRCSKKGLGRSIMRRIT | |
| | | EIPETVSRQCSKEDKEGAD | |
| | | HGTAKGTALIRKNPPESSG | |
| | | NTGKSKEETLKNRVFSLKKS | |
| | | HSTYDHVRDQTEESSSLPT | |
| | | ESQEEETTENSTLESLSGKK | |
| | | LTQKLKEDSEAESTESVPLV | |
| | | CKSASAHNLSSEKKTGHPR | |
| | | TSMLQKSLSVIASAKEKTLG | |
| | | LAGKTQTAGVEERTKSQKP | |
| | | LPKDKETNRNHSNSDNTET | |
| | | KDPAPQNSNPAEEPRKPQ | |
| | | KSGIMKQQRVNPTTANSD | |
| | | LNPGTTQMKDNFDIGEVC | |
| | | PWEVYDLTPGPVPSESKV | |
| | | QKHVSIVASEMEKNPTFSL | |
| | | KEKSHHKPKAAEVCQQSN | |
| | | QKRIDKAEVCLWESQGQSI | |
| | | LEDEKLLISKTPVLPERAKEE | |
| | | NGGQPRAANVCAGQSEEL | |
| | | PPKAVASKTENENLNQIGH | |
| | | QEKKTSSSEENVRGSYNSS | |
| | | NNFQQPLTSRAEVCPWEF | |
| | | ETPAQPNAGRSVALPASSA | |
| | | LSANKIAGPRKEEIWDSFK | |
| | | V | |
| SEQ ID NO: 1900 | ENSG00000151229.8 | MSRKASENVEYTLRSLSSL | A*02:03, A*02:07, A*11:01, |
| | | MGERRRKQPEPDAASAAG | A*11:02, A*24:10, A*34:01, |
| | | ECSLLAAAESSTSLQSAGA | B*15:01, B*15:21, B*15:27, |
| | | GGGGVGDLERAARRQFQ | B*27:04, B*40:01, B*40:06, |
| | | QDETPAFVYVVAVFSALGG | B*46:01, B*55:02, B*58:01, |
| | | FLFGYDTGVVSGAMLLLKR | C*01:02, C*03:02, C*03:04, |
| | | QLSLDALWQELLVSSTVGA | C*03:67, C*04:01, C*04:03, |
| | | AAVSALAGGALNGVFGRR | C*08:01, C*12:02, C*15:02 |
| | | AAILLASALFTAGSAVLAAA | |
| | | NNKETLLAGRLVVGLGIGIA | |
| | | SMTVPVYIAEVSPPNLRGR | |
| | | LVTINTLFITGGQFFASVVD | |
| | | GAFSYLQKDGW | |
| SEQ ID NO: 1901 | ENSG00000151914.13 | MAGYLSPAAYLYVEEQEYL | A*02:03, A*11:01, A*11:02, |
| | | QAYEDVLERYKDERDKVQ | A*24:02, A*24:07, A*24:10, |
| | | KKTFTKWINQHLMKVRKH | A*33:03, A*34:01, B*15:01, |
| | | VNDLYEDLRDGHNLISLLEV | B*15:27, B*39:01, B*40:01, |
| | | LSGDTLPREKGRMRFHRL | B*55:02, B*58:01, C*03:02, |
| | | QNVQIALDYLKRRQVKLVN | C*03:04, C*07:02, C*12:02, |
| | | IRNDDITDGNPKLTLGLIWT | C*14:02, C*15:02 |
| | | IILHFQISDIHVTGESEDMS | |
| | | AKERLLLWTQQATEGYAGI | |
| | | RCENFTTCWRDGKLFNAII | |
| | | HKYRPDLIDMNTVAVQSN | |
| | | LANLEHAFYVAEKIGVIRLL | |
| | | DPEDVDVSSPDEKSVITYVS | |
| | | SLYDAFPKVPEGGEGIGAN | |
| | | DVEVKWIEYQNMVNYLIQ | |
| | | WIRHHVTTMSERTFPNNP | |
| | | VELKALYNQYLQFKETEIPP | |
| | | KETEKSKIKRLYKLLEIWIEF | |
| | | GRIKLLQGYHPNDIEKEWG | |
| | | KLIIAMLEREKALRPEVERL | |
| | | EMLQQIANRVQRDSVICE | |
| | | DKLILAGNALQSDSKRLESG | |
| | | VQFQNEAEIAGYILECENLL | |
| | | RQHVIDVQILIDGKYYQAD | |
| | | QLVQRVAKLRDEIMALRN | |
| | | ECSSVYSKGRILTTEQTKLM | |
| | | ISGITQSLNSGFAQTLHPSL | |
| | | TSGLTQSLTPSLTSSSMTSG | |
| | | LSSGMTSRLTPSVTPAYTP | |
| | | GFPSGLVPNFSSGVEPNSL | |
| | | QTLKLMQIRKPLLKSSLLDQ | |
| | | NLTEEEINMKFVQDLLNW | |
| | | VDEMQVQLDRTEWGSDL | |
| | | PSVESHLENHKNVHRAIEE | |
| | | FESSLKEAKISEIQMTAPLKL | |
| | | TYAEKLHRLESQYAKLLNTS | |
| | | RNQERHLDTLHNFVSRAT | |
| | | NELIWLNEKEEEEVAYDWS | |
| | | ERNTNIARKKDYHAELMRE | |
| | | LDQKEENIKSVQEIAEQLLL | |
| | | ENHPARLTIEAYRAAMQT | |
| | | QWSWILQLCQCVEQHIKE | |
| | | NTAYFEFFNDAKEATDYLR | |
| | | NLKDAIQRKYSCDRSSSIHK | |
| | | LEDLVQESMEEKEELLQYK | |
| | | STIANLMGKAKTIIQLKPRN | |
| | | SDCPLKTSIPIKAICDYRQIEI | |
| | | TIYKDDECVLANNSHRAK | |
| | | WKVISPTGNEAMVPSVCF | |
| | | TVPPPNKEAVDLANRIEQQ | |
| | | YQNVLTLWHESHINMKSV | |
| | | VSWHYLINEIDRIRASNVAS | |
| | | IKTMLPGEHQQVLSNLQSR | |
| | | FEDFLEDSQESQVFSGSDIT | |
| | | QLEKEVNVCKQYYQELLKS | |
| | | AEREEQEESVYNLYISEVRN | |
| | | IRLRLENCEDRLIRQIRTPLE | |
| | | RDDLHESVFRITEQEKLKKE | |
| | | LERLKDDLGTITNKCEEFFS | |
| | | QAAASSSVPTLRSELNVVL | |
| | | QNMNQVYSMSSTYIDKLK | |
| | | TVNLVLKNTQAAEALVKLY | |
| | | ETKLCEEEAVIADKNNIENLI | |
| | | STLKQWRSEVDEKRQVFH | |
| | | ALEDELQKAKAISDEMFKT | |
| | | YKERDLDFDWHKEKADQL | |
| | | VERWQNVHVQIDNRLRDL | |
| | | EGIGKSLKYYRDTYHPLDD | |
| | | WIQQVETTQRKIQENQPE | |
| | | NSKTLATQLNQQKMLVSEI | |
| | | EMKQSKMDECQKYAEQYS | |
| | | ATVKDYELQTMTYRAMVD | |
| | | SQQKSPVKRRRMQSSADLI | |
| | | IQEFMDLRTRYTALVTLMT | |
| | | QYIKFAGDSLKRLEEEEKSL | |
| | | EEEKKEHVEKAKELQKWVS | |
| | | NISKTLKDAEKAGKPPFSK | |
| | | QKISSEEISTKKEQLSEALQT | |
| | | IQLFLAKHGDKMTDEERNE | |
| | | LEKQVKTLQESYNLLFSESL | |
| | | KQLQESQTSGDVKVEEKLD | |
| | | KVIAGTIDQTTGEVLSVFQ | |
| | | AVLRGLIDYDTGIRLLETQL | |
| | | MISGLISPELRKCFDLKDAK | |
| | | SHGLIDEQILCQLKELSKAK | |
| | | EIISAASPTTIPVLDALAQS | |
| | | MITESMAIKVLEILLSTGSLV | |
| | | IPATGEQLTLQKAFQQNLV | |
| | | SSALFSKVLERQNMCKDLI | |
| | | DPCTSEKVSLIDMVQRSTL | |
| | | QENTGMWLLPVRPQEGG | |
| | | RITLKCGRNISILRAAHEGLI | |
| | | DRETMFRLLSAQLLSGGLI | |
| | | NSNSGQRMTVEEAVREGV | |
| | | IDRDTASSILTYQVQTGGII | |
| | | QSNPAKRLTVDEAVQCDLI | |
| | | TSSSALLVLEAQRGYVGLI | |
| | | WPHSGEIFPTSSSLQQELIT | |
| | | NELAYKILNGRQKIAALYIP | |
| | | ESSQVIGLDAAKQLGIIDNN | |
| | | TASILKNITLPDKMPDLGDL | |
| | | EACKNARRWLSFCKFQPST | |
| | | VHDYRQEEDVFDGEEPVT | |
| | | TQTSEETKKLFLSYLMINSY | |
| | | MDANTGQRLLLYDGDLDE | |
| | | AVGMLLEGCHAEFDGNTA | |
| | | IKECLDVLSSSGVFLNNASG | |
| | | REKDECTATPSSFNKCHCG | |
| | | EPEHEETPENRKCAIDEEFN | |
| | | EMRNTVINSEFSQSGKLAS | |
| | | TISIDPKVNSSPSVCVPSLIS | |
| | | YLTQTELADISMLRSDSENI | |
| | | LTNYENQSRVETNERANEC | |
| | | SHSKNIQNFPSDLIENPIMK | |
| | | SKMSKFCGVNETENEDNT | |
| | | NRDSPIFDYSPRLSALLSHD | |
| | | KLMHSQGSFNDTHTPESN | |
| | | GNKCEAPALSFSDKTMLSG | |
| | | QRIGEKFQDQFLGIAAINIS | |
| | | LPGEQYGQKSLNMISSNP | |
| | | QVQYHNDKYISNTSGEDEK | |
| | | THPGFQQMPEDKEDESEIE | |
| | | EYSCAVTPGGDTDNAIVSL | |
| | | TCATPLLDETISASDYETSLL | |
| | | NDQQNNTGTDTDSDDDF | |
| | | YDTPLFEDDDHDSLLLDGD | |
| | | DRDCLHPEDYDTLQEEND | |
| | | ETASPADVFYDVSKENENS | |
| | | MVPQGAPVGSLSVKNKAH | |
| | | CLQDFLMDVEKDELDSGE | |
| | | KIHLNPVGSDKVNGQSLET | |
| | | GSERECTNILEGDESDSLTD | |
| | | YDIVGGKESFTASLKFDDSG | |
| | | SWRGRKEEYVTGQEFHSD | |
| | | TDHLDSMQSEESYGDYIYD | |
| | | SNDQDDDDDDGIDEEGG | |
| | | GIRDENGKPRCQNVAEDM | |
| | | DIQLCASILNENSDENENIN | |
| | | TMILLDKMHSCSSLEKQQR | |
| | | VNVVQLASPSENNLVTEKS | |
| | | NLPEYTTEIAGKSKENLLNH | |
| | | EMVLKDVLPPIIKDTESEKT | |
| | | FGPASISHDNNNISSTSELG | |
| | | TDLANTKVKLIQGSELPELT | |
| | | DSVKGKDEYFKNMTPKVD | |
| | | SSLDHIICTEPDLIGKPAEES | |
| | | HLSLIASVTDKDPQGNGSD | |
| | | LIKGRDGKSDILIEDETSIQK | |
| | | MYLGEGEVLVEGLVEEENR | |
| | | HLKLLPGKNTRDSFKLINSQ | |
| | | FPFPQITNNEELNQKGSLK | |
| | | KATVTLKDEPNNLQIIVSKS | |
| | | PVQFENLEEIFDTSVSKEIS | |
| | | DDITSDITSWEGNTHFEESF | |
| | | TDGPEKELDLFTYLKHCAK | |
| | | NIKAKDVAKPNEDVPSHVL | |
| | | ITAPPMKEHLQLGVNNTKE | |
| | | KSTSTQKDSPLNDMIQSN | |
| | | DLCSKESISGGGTEISQFTP | |
| | | ESIEATLSILSRKHVEDVGK | |
| | | NDFLQSERCANGLGNDNS | |
| | | SNTLNTDYSFLEINNKKERI | |
| | | EQQLPKEQALSPRSQEKEV | |
| | | QIPELSQVFVEDVKDILKSR | |
| | | LKEGHMNPQEVEEPSACA | |
| | | DTKILIQNLIKRITTSQLVNE | |
| | | ASTVPSDSQMSDSSGVSP | |
| | | MTNSSELKPESRDDPFCIG | |
| | | NLKSELLLNILKQDQHSQKI | |
| | | TGVFELMRELTHMEYDLEK | |
| | | RGITSKVLPLQLENIFYKLLA | |
| | | DGYSEKIEHVGDFNQKACS | |
| | | TSEMMEEKPHILGDIKSKE | |
| | | GNYYSPNLETVKEIGLESST | |
| | | VWASTLPRDEKLKDLCNDF | |
| | | PSHLECTSGSKEMASGDSS | |
| | | TEQFSSELQQCLQHTEKM | |
| | | HEYLTLLQDMKPPLDNQES | |
| | | LDNNLEALKNQLRQLETFE | |
| | | LGLAPIAVILRKDMKLAEEF | |
| | | LKSLPSDFPRGHVEELSISH | |
| | | QSLKTAFSSLSNVSSERTKQ | |
| | | IMLAIDSEMSKLAVSHEEFL | |
| | | HKLKSFSDWVSEKSKSVKD | |
| | | IEIVNVQDSEYVKKRLEFLK | |
| | | NVLKDLGHTKMQLETTAF | |
| | | DVQFFISEYAQDLSPNQSK | |
| | | QLLRLLNTTQKCFLDVQES | |
| | | VTTQVERLETQLHLEQDLD | |
| | | DQKIVAERQQEYKEKLQGI | |
| | | CDLLTQTENRLIGHQEAFM | |
| | | IGDGTVELKKYQSKQEELQ | |
| | | KDMQGSAQALAEVVKNTE | |
| | | NFLKENGEKLSQEDKALIE | |
| | | QKLNEAKIKCEQLNLKAEQ | |
| | | SKKELDKVVTTAIKEETEKV | |
| | | AAVKQLEESKTKIENLLDW | |
| | | LSNVDKDSERAGTKHKQVI | |
| | | EQNGTHFQEGDGKSAIGE | |
| | | EDEVNGNLLETDVDGQVG | |
| | | TTQENLNQQYQKVKAQHE | |
| | | KIISQHQAVIIATQSAQVLL | |
| | | EKQGQYLSPEEKEKLQKN | |
| | | MKELKVHYETALAESEKKM | |
| | | KLTHSLQEELEKFDADYTEF | |
| | | EHWLQQSEQELENLEAGA | |
| | | DDINGLMTKLKRQKSFSED | |
| | | VISHKGDLRYITISGNRVLE | |
| | | AAKSCSKRDGGKVDTSAT | |
| | | HREVQRKLDHATDRFRSLY | |
| | | SKCNVLGNNLKDLVDKYQ | |
| | | HYEDASCGLLAGLQACEAT | |
| | | ASKHLSEPIAVDPKNLQRQ | |
| | | LEETKALQGQISSQQVAVE | |
| | | KLKKTAEVLLDARGSLLPAK | |
| | | NDIQKTLDDIVGRYEDLSKS | |
| | | VNERNEKLQITLTRSLSVQD | |
| | | GLDEMLDWMGNVESSLK | |
| | | EQDVGTGYCRSSEQYKCH | |
| | | E | |
| SEQ ID NO: 1902 | ENSG00000152359.10 | MSSDEEKYSLPVVQNDSSR | A*02:03, A*11:01, A*11:02, |
| | | GSSVSSNLQEEYEELLHYAI | A*24:02, A*24:10, A*33:03, |
| | | VTPNIEPCASQSSHPKGEL | A*34:01, B*39:01, B*40:01, |
| | | VPDVRISTIHDILHSQGNNS | B*55:02, C*03:02, C*03:04, |
| | | EVRETAIEVGKGCDFHISSH | C*12:02 |
| | | SKTDESSPVLSPRKPSHPV | |
| | | MDFFSSHLLADSSSPATNS | |
| | | SHTDAHEILVSDFLVSDENL | |
| | | QKMENVLDLWSSGLKTNII | |
| | | SELSKWRLNFIDWHRME | |
| | | MRKEKEKHAAHLKQLCNQ | |
| | | INELKELQKTFEISIGRKDEV | |
| | | ISSLSHAIGKQKEKIELMRTF | |
| | | FHWRIGHVRARQDVYEGK | |
| | | LADQYYQRTLLKKVWKVW | |
| | | RSVVQKQWKDVVERACQ | |
| | | ARAEEVCIQISNDYEAKVA | |
| | | MLSGALENAKAEIQRMQH | |
| | | EKEHFEDSMKKAFMRGVC | |
| | | ALNLEAMTIFQNRNDAGI | |
| | | DSTNNKKEEYGPGVQGKE | |
| | | HSAHLDPSAPPMPLPVTSP | |
| | | LLPSPPAAVGGASATAVPS | |
| | | AASMTSTRAASASSVHVP | |
| | | VSALGAGSAATAASEEMY | |
| | | VPRVVTSAQQKAGRTITAR | |
| | | ITGRCDFASKNRISSSLAIM | |
| | | GVSPPMSSVVVEKHHPVT | |
| | | VQTIPQATAAKYPRTIHPES | |
| | | STSASRSLGTRSAHTQSLTS | |
| | | VHSIKVVD | |
| SEQ ID NO: 1903 | ENSG00000153046.13 | MASEELYEVERIVDKRKNK | A*02:03, A*11:01, A*11:02, |
| | | KGKTEYLVRWKGYDSEDD | A*33:03, B*15:01, C*03:02, |
| | | TWEPEQHLVNCEEYIHDF | C*07:02, C*15:02 |
| | | NRRHTEKQKESTLTRTNRT | |
| | | SPNNARKQISRSTNSNFSK | |
| | | TSPKALVIGKDHESKNSQLF | |
| | | AASQKFRKNTAPSLSSRKN | |
| SEQ ID NO: 1904 | ENSG00000154556.13 | MSYYQRPFSPSAYSLPASL | A*02:03, A*11:01, A*11:02, |
| | | NSSIVMQHGTSLDSTDTYP | A*24:10, A*33:03, B*15:01, |
| | | QHAQSLDGTTSSSIPLYRSS | B*15:27, B*39:01, B*58:01, |
| | | EEEKRVTVIKAPHYPGIGPV | C*03:02, C*03:04, C*07:02, |
| | | DESGIPTAIRTTVDRPKDW | C*12:02, C*14:02, C*15:02 |
| | | YKTMFKQIHMVHKPDDDT | |
| | | DMYNTPYTYNAGLYNPPY | |
| | | SAQSHPAAKTQTYRPLSKS | |
| | | HSDNSPNAFKDASSPVPPP | |
| | | HVPPPVPPLRPRDRSSTEK | |
| | | HDWDPPDRKVDTRKFRSE | |
| | | PRSIFEYEPGKSSILQHERPA | |
| | | SLYQSSIDRSLERPMSSAS | |
| | | MASDFRKRRKSEPAVGPP | |
| | | RGLGDQSASRTSPGRVDLP | |
| | | GSSTTLTKSFTSSSPSSPSRA | |
| | | KGGDDSKICPSLCSYSGLN | |
| | | GNPSSELDYCSTYRQHLDV | |
| | | PRDSPRAISFKNGWQMAR | |
| | | QNAEIWSSTEETVSPKIKSR | |
| | | SCDDLLNDDCDSFPDPKVK | |
| | | SESMGSLLCEEDSKESCPM | |
| | | AWGSPYVPEVRSNGRSRIR | |
| | | HRSARNAPGFLKMYKKM | |
| | | HRINRKDLMNSEVICSVKS | |
| | | RILQYESEQQHKDLLRAWS | |
| | | QCSTEEVPRDMVPTRISEF | |
| | | EKLIQKSKSMPNLGDDMLS | |
| | | PVTLEPPQNGLCPKRRFSIE | |
| | | YLLEEENQSGPPARGRRGC | |
| | | QSNALVPIHIEVTSDEQPR | |
| | | AHVEFSDSDQDGVVSDHS | |
| | | DYIHLEGSSFCSESDFDHFS | |
| | | FTSSESFYGSSHHHHHHHH | |
| | | HHHRHLISSCKGRCPASYT | |
| | | RFTTMLKHERARHENTEEP | |
| | | RRQEMDPGLSKLAFLVSPV | |
| | | PFRRKKNSAPKKQTEKAKC | |
| | | KASVFEALDSALKDICDQIK | |
| | | AEKKRGSLPDNSILHRLISEL | |
| | | LPDVPERNSSLRALRRSPLH | |
| | | QPLHPLPPDGAIHCPPYQN | |
| | | DCGRMPRSASFQDVDTAN | |
| | | SSCHHQDRGGAL | |
| SEQ ID NO: 1905 | ENSG00000155275.14 | MAEVGRTGISYPGALLPQG | A*02:03, A*11:01, A*11:02, |
| | | FWAAVEVWLERPQVANK | A*24:02, A*24:10, A*33:03, |
| | | RLCGARLEARWSAALPCAE | B*15:01, B*15:27, B*39:01, |
| | | ARGPGTSAGSEQKERGPG | B*40:01, B*55:02, B*58:01, |
| | | PGQGSPGGGPGPRSLSGP | C*03:02, C*14:02, C*15:02 |
| | | EQGTACCELEEAQGQCQQ | |
| | | EEAQREAASVPLRDSGHP | |
| | | GHAEGREGDFPAADLDSL | |
| | | WEDFSQSLARGNSELLAFL | |
| | | TSSGAGSQPEAQRELDVVL | |
| | | RTVIPKTSPHCPLTTPRREIV | |
| | | VQDVLNGTITFLPLEEDDE | |
| | | GNLKVKMSNVYQIQLSHS | |
| | | KEEWFISVLIFCPERWHSD | |
| | | GIVYPKPTWLGEELLAKLAK | |
| | | WSVENKKSDFKSTLSLISIM | |
| | | KYSKAYQELKEKYKEMVKV | |
| | | WPEVTDPEKFVYEDVAIAA | |
| | | YLLILWEEERAERRLTARQS | |
| | | FVDLGCGNGLLVHILSSEG | |
| | | HPGRGIDVRRRKIWDMYG | |
| | | PQTQLEEDAITPNDKTLFP | |
| | | DVDWLIGNHSDELTPWIP | |
| | | VIAARSSYNCRFFVLPCCFF | |
| | | DFIGRYSRRQSKKTQYREYL | |
| | | DFIKEVGFTCGFHVDEDCL | |
| | | RIPSTKRVCLVGKSRTYPSS | |
| | | REASVDEKRTQYIKSRRGC | |
| | | PVSPPGWELSPSPRWVAA | |
| | | GSAGHCDGQQALDARVG | |
| | | CVTRAWAAEHGAGPQAE | |
| | | GPWLPGFHPREKAERVRN | |
| | | CAALPRDFIDQVVLQVANL | |
| | | LLGGKQLNTRSSRNGSLKT | |
| | | WNGGESLSLAEVANELDT | |
| | | ETLRRLKRECGGLQTLLRNS | |
| | | HQVFQVVNGRVHIRDWR | |
| | | EETLWKTKQPEAKQRLLSE | |
| | | ACKTRLCWFFMHHPDGC | |
| | | ALSTDCCPFAHGPAELRPP | |
| | | RTTPRKKIS | |
| SEQ ID NO: 1906 | ENSG00000155506.12 | MATQVEPLLPGGATLLQA | A*02:03 |
| | | EEHGGLVRKKPPPAPEGKG | |
| | | EPGPNDVRGGEPDGSARR | |
| | | PRPPCAKPHKEGTGQQER | |
| | | ESPRPLQLPGAEGPAISDG | |
| | | EEGGGEPGAGGGAAGAA | |
| | | GAGRRDFVEAPPPKVNPW | |
| | | TKNALPPVLTTVNGQ | |
| SEQ ID NO: 1907 | ENSG00000157514.12 | MNTEMYQTPMEVAVYQL | A*02:03, A*24:02, A*24:07, |
| | | HNFSISFFSSLLGGDVVSVK | A*24:10, B*15:01, C*03:02, |
| | | LD | C*03:04, C*03:67, C*12:02, |
| | | | C*15:02 |
| SEQ ID NO: 1908 | ENSG00000158321.11 | MDGPTRGHGLRKKRRSRS | A*02:03, A*24:10, B*15:01, |
| | | QRDRERRSRGGLGAGAAG | B*15:27, B*39:01, B*58:01, |
| | | GGGAGRTRALSLASSSGSD | C*03:02, C*03:04, C*03:67, |
| | | KEDNGKPPSSAPSRPRPPR | C*12:02, C*14:02, C*15:02 |
| | | RKRRESTSAEEDIIDGFAMT | |
| | | SFVTFEALEKDVALKPQER | |
| | | VEKRQTPLTKKKREALTNG | |
| | | LSFHSKKSRLSHPHHYSSDR | |
| | | ENDRNLCQHLGKRKKMPK | |
| | | ALRQLKPGQNSCRDSDSES | |
| | | ASGESKGFHRSSSRERLSDS | |
| | | SAPSSLGTGYFCDSDSDQE | |
| | | EKASDASSEKLFNTVIVNKD | |
| | | PELGVGTLPEHDSQDAGPI | |
| | | VPKISGLERSQEKSQDCCKE | |
| | | PIFEPVVLKDPCPQVAQPIP | |
| | | QPQTEPQLRAPSPDPDLV | |
| | | QRTEAPPQPPPLSTQPPQ | |
| | | GPPEAQLQPAPQPQVQRP | |
| | | PRPQSPTQLLHQNLPPVQ | |
| | | AHPSAQSLSQPLSAYNSSSL | |
| | | SLNSLSSSRSSTPAKTQPAP | |
| | | PHISHHPSASPFPLSLPNHS | |
| | | PLHSFTPTLQPPAHSHHPN | |
| | | MFAPPTALPPPPPLT | |
| SEQ ID NO: 1909 | ENSG00000158486.9 | MGATGRLELTLAAPPHPG | A*02:03, A*02:07, A*11:01, |
| | | PAFQRSKARETQGEEEGSE | A*11:02, A*24:02, A*24:07, |
| | | MQIAKSDSIHHMSHSQGQ | A*24:10, A*33:03, A*34:01, |
| | | PELPPLPASANEEPSGLYQT | B*15:01, B*15:21, B*15:27, |
| | | VMSHSFYPPLMQRTSWTL | B*27:04, B*38:02, B*39:01, |
| | | AAPFKEQHHHRGPSDSIA | B*40:01, B*40:06, B*46:01, |
| | | NNYSLMAQDLKLKDLLKVY | B*51:01, B*55:02, B*58:01, |
| | | QPATISVPRDRTGQGLPSS | C*01:02, C*03:02, C*03:04, |
| | | GNRSSSEPMRKKTKFSSRN | C*03:67, C*04:01, C*04:03, |
| | | KEDSTRIKLAFKTSIFSPMK | C*07:02, C*08:01, C*12:02, |
| | | KEVKTSLTFPGSRPMSPEQ | C*14:02, C*15:02 |
| | | QLDVMLQQEMEMESKEK | |
| | | KPSESDLERYYYYLTNGIRK | |
| | | DMIAPEEGEVMVRISKLIS | |
| | | NTLLTSPFLEPLMVVLVQE | |
| | | KENDYYCSLMKSIVDYILM | |
| | | DPMERKRLFIESIPRLFPQR | |
| | | VIRAPVPWHSVYRSAKKW | |
| | | NEEHLHTVNPMMLRLKEL | |
| | | WFAEFRDLRFVRTAEILAG | |
| | | KLPLQPQEFWDVIQKHCLE | |
| | | AHQTLLNKWIPTCAQLFTS | |
| | | RKEHWIHFAPKSNYDSSRN | |
| | | IEEYFASVASFMSLQLRELV | |
| | | IKSLEDLVSLFMIHKDGNDF | |
| | | KEPYQEMKFFIPQLIMIKLE | |
| | | VSEPIIVFNPSFDGCWELIR | |
| | | DSFLEIIKNSNGIPKLKYIPLK | |
| | | FSFTAAAADRQCVKAAEP | |
| | | GEPSMHAAATAMAELKGY | |
| | | NLLLGTVNAEEKLVSDFLIQ | |
| | | TFKVFQKNQVGPCKYLNV | |
| | | YKKYVDLLDNTAEQNIAAF | |
| | | LKENHDIDDFVTKINAIKKR | |
| | | RNEIASMNITVPLAMFCLD | |
| | | ATALNHDLCERAQNLKDH | |
| | | LIQFQVDVNRDTNTSICNQ | |
| | | YSHIADKVSEVPANTKELVS | |
| | | LIEFLKKSSAVTVFKLRRQLR | |
| | | DASERLEFLMDYADLPYQI | |
| | | EDIFDNSRNLLLHKRDQAE | |
| | | MDLIKRCSEFELRLEGYHRE | |
| | | LESFRKREVMTTEEMKHN | |
| | | VEKLNELSKNLNRAFAEFEL | |
| | | INKEEELLEKEKSTYPLLQA | |
| | | MLKNKVPYEQLWSTAYEF | |
| | | SIKSEEWMNGPLFLLNAEQ | |
| | | IAEEIGNMWRTTYKLIKTLS | |
| | | DVPAPRRLAENVKIKIDKFK | |
| | | QYIPILSISCNPGMKDRHW | |
| | | QQISEIVGYEIKPTETTCLSN | |
| | | MLEFGFGKFVEKLEPIGAA | |
| | | ASKEYSLEKNLDRMKLDW | |
| | | VNVTFSFVKYRDTDTNILC | |
| | | AIDDIQMLLDDHVIKTQTM | |
| | | CGSPFIKPIEAECRKWEEKLI | |
| | | RIQDNLDAWLKCQATWLY | |
| | | LEPIFSSEDIIAQMPEEGRK | |
| | | FGIVDSYWKSLMSQAVKD | |
| | | NRILVAADQPRMAEKLQE | |
| | | ANFLLEDIQKGLNDYLEKKR | |
| | | LFFPRFFFLSNDELLEILSETK | |
| | | DPLRVQPHLKKCFEGIAKLE | |
| | | FTDNLEIVGMISSEKETVPFI | |
| | | QKIYPANAKGMVEKWLQ | |
| | | QVEQMMLASMREVIGLGI | |
| | | EAYVKVPRNHWVLQWPG | |
| | | QVVICVSSIFWTQEVSQAL | |
| | | AENTLLDFLKKSNDQIAQIV | |
| | | QLVRGKLSSGARLTLGALT | |
| | | VIDVHARDVVAKLSEDRVS | |
| | | DLNDFQWISQLRYYWVAK | |
| | | DVQVQIITTEALYGYEYLGN | |
| | | SPRLVITPLTDRCYRTLMGA | |
| | | LKLNLGGAPEGPAGTGKTE | |
| | | TTKDLAKALAKQCVVFNCS | |
| | | DGLDYKAMGKFFKGLAQA | |
| | | GAWACFDEFNRIEVEVLSV | |
| | | VAQQILSIQQAIIRKLKTFIF | |
| | | EGTELSLNPTCAVFIT | |
| SEQ ID NO: 1910 | ENSG00000159263.11 | MKEKSKNAAKTRREKENG | A*02:03, A*24:02, A*24:07, |
| | | EFYELAKLLPLPSAITSQLDK | A*24:10, A*34:01, B*15:01, |
| | | ASIIRLTTSYLKMRAVFPEG | B*15:21, B*15:27, B*38:02, |
| | | LGDA | B*39:01, B*40:01, B*40:06, |
| | | | B*51:01, B*55:02, C*14:02, |
| | | | C*15:02 |
| SEQ ID NO: 1911 | ENSG00000159788.14 | MFRAGEASKRPLPGPSPPR | A*02:03, A*11:01, A*11:02, |
| | | VRSVEVARGRAGYGFTLSG | A*24:10, A*33:03, A*34:01, |
| | | QAPCVLSCVMRGSPADFV | B*15:01, B*40:01, B*55:02, |
| | | GLRAGDQILAVNEINVKKA | C*15:02 |
| | | SHEDVVKLIGKCSGVLHMV | |
| | | IAEGVGRFESCSSDEEGGLY | |
| | | EGKGWLKPKLDSKALGINR | |
| | | AERVVEEMQSGGIFNMIF | |
| | | ENPSLCASNSEPLKLKQRSL | |
| | | SESAATRFDVGHESINNPN | |
| | | PNMLSKEEISKVIHDDSVFS | |
| | | IGLESHDDFALDASILNVA | |
| | | MIVGYLGSIELPSTSSNLES | |
| | | DSLQAIRGCMRRLRAEQKI | |
| | | HSLVTMKIMHDCVQLSTD | |
| | | KAGVVAEYPAEKLAFSAVC | |
| | | PDDRRFFGLVTMQTNDD | |
| | | GSLAQEEEGALRTSCHVF | |
| | | MVDPDLFNHKIHQGIARR | |
| | | FGFECTADPDTNGCLEFPA | |
| | | SSLPVLQFISVLYRDMGELI | |
| | | EGMRARAFLDGDADAHQ | |
| | | NNSTSSNSDSGIGNFHQEE | |
| | | KSNRVLVVD | |
| SEQ ID NO: 1912 | ENSG00000160200.13 | MPSETPQAEVGPTGCPHR | A*02:03, A*11:01, A*11:02, |
| | | SGPHSAKGSLEKGSPEDKE | A*24:10, A*33:03, B*15:01, |
| | | AKEPLWIRPDAPSRCTWQ | B*38:02, B*39:01, B*40:01, |
| | | LGRPASESPHHHTAPAKSP | B*58:01, C*03:02, C*03:04, |
| | | KILPDILKKIGDTPMVRINKI | C*07:02, C*14:02 |
| | | GKKFGLKCELLAKCEFFNA | |
| | | GGSVKDRISLRMIEDAERD | |
| | | GTLKPGDTIIEPTSGNTGIG | |
| | | LALAAAVRGYRCIIVMPEK | |
| | | MSSEKVDVLRALGAEIVRT | |
| | | PTNARFDSPESHVGVAWR | |
| | | LKNEIPNSHILDQYRNASN | |
| | | PLAHYDTTADEILQQCDGK | |
| | | LDMLVASVGTGGTITGIAR | |
| | | KLKEKCPGCRIIGVDPEGSIL | |
| | | AEPEELNQTEQTTYEVEGI | |
| | | GYDFIPTVLDRTVVDKWFK | |
| | | SNDEEAFTFARMLIAQEGL | |
| | | LCGGSAGSTVAVAVKAAQ | |
| | | ELQEGQRCVVILPDSVRNY | |
| | | MTKFLSDRWMLQKGFLKE | |
| | | EDLTEKKPWWWHLRVQE | |
| | | LGLSAPLTVLPTITCGHTIEIL | |
| | | REKGFDQAPVVDEAGVILG | |
| | | MVTLGNMLSSLLAGKVQP | |
| | | SDQVGKVIYKQFKQIRLTD | |
| | | TLGRLSHILEMDHFALVVH | |
| | | EQIQYHSTGKSSQRQMVF | |
| | | GVVTAIDLLNFVAAQERDQ | |
| | | K | |
| SEQ ID NO: 1913 | ENSG00000160799.7 | MQDGRKGGAYAGKMEAT | A*02:03 |
| | | TAGVGRLEEEALRRKERLK | |
| | | ALREKTG | |
| SEQ ID NO: 1914 | ENSG00000160838.9 | MSSEQSAPGASPRAPRPG | A*02:03, A*11:01, A*11:02, |
| | | TQKSSGAVTKKGERAAKEK | A*24:02, A*24:07, A*24:10, |
| | | PATVLPPVGEEEPKSPEEY | B*40:01, B*55:02, C*01:02, |
| | | QCSGVLETDFAELCTRWG | C*03:02, C*04:01, C*04:03, |
| | | YTDFPKVVNRPRPHPPFVP | C*07:02, C*15:02 |
| | | SASLSEKATLDDPRLSGSCS | |
| | | LNSLESKYVFFRPTIQVELE | |
| | | QEDSKSVKEIYIRGWKVEE | |
| | | RILGVFSKCLPPLTQLQAIN | |
| | | LWKVGLTDKTLTTFIELLPL | |
| | | CSSTLRKVSLEGNPLPEQSY | |
| | | HKL | |
| SEQ ID NO: 1915 | ENSG00000164093.11 | METNCRKLVSACVQLGVQ | A*11:01, A*11:02, A*33:03 |
| | | PAAVECLFSKDSEIKKVEFT | |
| | | DSPESRKEAASSKFFPRQH | |
| SEQ ID NO: 1916 | ENSG00000164764.10 | MRTLWMALCALSRLWPG | A*11:01, A*11:02, A*24:10, |
| | | AQAGCAEAGRCCPGRDPA | A*33:03, B*55:02, C*03:02, |
| | | CFARGWRLDRVYGTCFCD | C*03:04 |
| | | QACRFTGDCCFDYDRACP | |
| | | ARPCFVGEWSPWSGCAD | |
| | | QCKPTTRVRRRSVQQEPQ | |
| | | NGGAPCPPLEERAGCLEYS | |
| | | TPQGQDCGHTYVPAFITTS | |
| | | AFNKERTRQATSPHWSTH | |
| | | TEDAGYCMEFKTESLTPHC | |
| | | ALENWPLTRWMQYLREG | |
| | | YTVCVDCQPPAMNSVSLR | |
| | | CSGDGLDSDGNQTLHWQ | |
| | | AIGNPRCQGTWKKVRRVD | |
| | | QCSCPAVHSFIFI | |
| SEQ ID NO: 1917 | ENSG00000164830.13 | MDYLTTFTEKSGRLLRGTA | A*33:03 |
| | | NRLLGFGGGGEARQVRFE | |
| | | DYLREPAQGDLGCGSPPH | |
| | | RPPAPSSPEGP | |
| SEQ ID NO: 1918 | ENSG00000166689.10 | MAAATVGRDTLPEHWSY | A*33:03 |
| | | GVCRDGRVFFINDQLRCTT | |
| | | WLHPRTGEPVNSGHMIRS | |
| | | DLPRGWEE | |
| SEQ ID NO: 1919 | ENSG00000167157.9 | MDSAAAAFALDKPALGPG | A*11:01, A*11:02, C*03:02, |
| | | PPPPPPALGPGDCAQARK | C*03:04, C*03:67 |
| | | NFSVSHLLDLEEVAAAGRL | |
| | | AARPGARAEAREGAAREP | |
| | | SGGSSGSEAAPQ | |
| SEQ ID NO: 1920 | ENSG00000167632.10 | MSVPDYMQCAEDHQTLL | A*02:03, A*02:07, A*11:01, |
| | | VVVQPVGIVSEENFFRIYKR | A*11:02, A*24:02, A*24:07, |
| | | ICSVSQISVRDSQRVLYIRYR | A*24:10, A*33:03, B*15:01, |
| | | HHYPPENNEWGDFQTHR | B*15:27, B*39:01, B*40:01, |
| | | KVVGLITITDCFSAKDWPQ | B*55:02, B*58:01, C*03:02, |
| | | TFEKFHVQKEIYGSTLYDSR | C*03:04, C*03:67, C*07:02, |
| | | LFVFGLQGEIVEQPRTDVA | C*12:02, C*14:02, C*15:02 |
| | | FYPNYEDCQTVEKRIEDFIE | |
| | | SLFIVLESKRLDRATDKSGD | |
| | | KIPLLCVPFEKKDFVGLDTD | |
| | | SRHYKKRCQGRMRKHVG | |
| | | DLCLQAGMLQDSLVHYH | |
| | | MSVELLRSVNDFLWLGAA | |
| | | LEGLCSASVIYHYPGGTGG | |
| | | KSGARRFQGSTLPAEAANR | |
| | | HRPGALTTNGINPDTSTEI | |
| | | GRAKNCLSPEDIIDKYKEAIS | |
| | | YYSKYKNAGVIELEACIKAV | |
| | | RVLAIQKRSMEASEFLQNA | |
| | | VYINLRQLSEEEKIQRYSILS | |
| | | ELYELIGFHRKSAFFKRVAA | |
| | | MQCVAPSIAEPGWRACYK | |
| | | LLLETLPGYSLSLDPKDFSR | |
| | | GTHRGWAAVQMRLLHEL | |
| | | VYASRRMGNPALSVRHLSF | |
| | | LLQTMLDFLSDQEKKDVA | |
| | | QSLENYTSKCPGTMEPIAL | |
| | | PGGLTLPPVPFTKLPIVRHV | |
| | | KLLNLPASLRPHKMKSLLG | |
| | | QNVSTKSPFIYSPIIAHNRG | |
| | | EERNKKIDFQWVQGDVCE | |
| | | VQLMVYNPMPFELRVEN | |
| | | MGLLTSGVEFESLPAALSLP | |
| | | AESGLYPVTLVGVPQTTGTI | |
| | | TVNGYHTTVFGVFSDCLLD | |
| | | NLPGIKTSGSTVEVIPALPR | |
| | | LQISTSLPRSAHSLQPSSGD | |
| | | EISTNVSVQLYNGESQQLII | |
| | | KLENIGMEPLEKLEVTSKVL | |
| | | TTKEKLYGDFLSWKLEETLA | |
| | | QFPLQPGKVATFTINIKVKL | |
| | | DFSCQENLLQDLSDDGISV | |
| | | SGFPLSSPFRQVVRPRVEG | |
| | | KPVNPPESNKAGDYSHVKT | |
| | | LEAVLNFKYSGGPGHTEGY | |
| | | YRNLSLGLHVEVEPSVFFTR | |
| | | VSTLPATSTRQCHLLLDVF | |
| | | NSTEHELTVSTRSSEALILH | |
| | | AGECQRMAIQVDKFNFES | |
| | | FPESPGEKGQFANPKQLEE | |
| | | ERREARGLEIHSKLGICWRI | |
| | | PSLKRSGEASVEGLLNQLVL | |
| | | EHLQLAPLQWDVLVDGQP | |
| | | CDREAVAACQVGDPVRLE | |
| | | VRLTNRSPRSVGPFALTVV | |
| | | PFQDHQNGVHNYDLHDT | |
| | | VSFVGSSTFYLDAVQPSGQ | |
| | | SACLGALLFLYTGDFFLHIRF | |
| | | HEDSTSKELPPSWFCLPSV | |
| | | HVCALEAQA | |
| SEQ ID NO: 1921 | ENSG00000170615.10 | MDHAEENEILAATQRYYVE | A*02:03, A*02:07, A*11:01, |
| | | RPIFSHPVLQERLHTKDKVP | A*11:02, A*24:02, A*24:07, |
| | | DSIADKLKQAFTCTPKKIRN | A*24:10, A*33:03, A*34:01, |
| | | IIYMFLPITKWLPAYKFKEY | B*15:01, B*15:21, B*15:27, |
| | | VLGDLVSGISTGVLQLPQG | B*27:04, B*38:02, B*39:01, |
| | | LAFAMLAAVPPIFGLYSSFY | B*40:01, B*40:06, B*46:01, |
| | | PVIMYCFLGTSRHISIGPFA | B*51:01, B*55:02, B*58:01, |
| | | VISLMIGGVAVRLVPDDIVI | C*01:02, C*03:02, C*03:04, |
| | | PGGVNATNGTEARDALRV | C*03:67, C*04:01, C*04:03, |
| | | KVAMSVTLLSGIIQFCLGVC | C*08:01, C*12:02, C*14:02, |
| | | RFGFVAIYLTEPLVRGFTTA | C*15:02 |
| | | AAVHVFTSMLKYLFGVKTK | |
| | | RYSGIFSVVYSTVAVLQNV | |
| | | KNLNVCSLGVGLMVFGLLL | |
| | | GGKEFNERFKEKLPAPIPLE | |
| | | FFAVVMGTGISAGFNLKES | |
| | | YNVDVVGTLPLGLLPPANP | |
| | | DTSLFHLVYVDAIAIAIVGFS | |
| | | VTISMAKTLANKHGYQVD | |
| | | GNQELIALGLCNSIGSLFQT | |
| | | FSISCSLSRSLVQEGTGGKT | |
| | | QLAGCLASLMILLVILATGF | |
| | | LFESLPQAVLSAIVIVNLKG | |
| | | MFMQFSDLPFFWRTSKIEL | |
| | | TIWLTTFVSSLFLGLDYGLIT | |
| | | AVIIALLTVIYRTQS | |
| SEQ ID NO: 1922 | ENSG00000171680.16 | MHYDGHVRFDLPPQGSVL | A*02:03, A*02:07, A*11:01, |
| | | ARNVSTRSCPPRTSPAVDL | A*11:02, A*24:10, A*33:03, |
| | | EEEEEESSVDGKGDRKSTG | B*15:01, B*39:01, B*40:01, |
| | | LKLSKKKARRRHTDDPSKE | B*58:01, C*03:02, C*03:04, |
| | | CFTLKFDLNVDIETEIVPAM | C*07:02, C*12:02, C*14:02, |
| | | KKKSLGEVLLPVFERKGIAL | C*15:02 |
| | | GKVDIYLDQSNTPLSLTFEA | |
| | | YRFGGHYLRVKAPAKPGDE | |
| | | GKVEQGMKDSKSLSLPILR | |
| | | PAGTGPPALERVDAQSRRE | |
| | | SLDILAPGRRRKNMSEFLG | |
| | | EASIPGQEPPTPSSCSLPSG | |
| | | SSGSTNTGDSWKNRAASR | |
| | | FSGFFSSGPSTSAFGREVDK | |
| | | MEQLEGKLHTYSLFGLPRL | |
| | | PRGLRFDHDSWEEEYDED | |
| | | EDEDNACLRLEDSWRELID | |
| | | GHEKLTRRQCHQQEAVW | |
| | | ELLHTEASYIRKLRVIINLFLC | |
| | | CLLNLQESGLLCEVEAERLF | |
| | | SNIPEIAQLHRRLWASVMA | |
| | | PVLEKARRTRALLQPGDFL | |
| | | KGFKMFGSLFKPYIRYCME | |
| | | EEGCMEYMRGLLRDNDLF | |
| | | RAYITWAEKHPQCQRLKLS | |
| | | DMLAKPHQRLTKYPLLLKS | |
| | | VLRKTEEPRAKEAVVAMIG | |
| | | SVERFIHHVNACMRQRQE | |
| | | RQRLAAVVSRIDAYEVVES | |
| | | SSDEVDKLLKEFLHLDLTAPI | |
| | | PGASPEETRQLLLEGSLRM | |
| | | KEGKDSKMDVYCFLFTDLL | |
| | | LVTKAVKKAERTRVIRPPLL | |
| | | VDKIVCRELRDPGSFLLIYLN | |
| | | EFHSAVGAYTFQASGQALC | |
| | | RGWVDTIYNAQNQLQQL | |
| | | RAQEPPGSQQPLQSLEEEE | |
| | | DEQEEEEEEEEEEEEGEDS | |
| | | GTSAASSPTIMRKSSGSPD | |
| | | SQHCASDGSTETLAMVVV | |
| | | EPGDTLSSPEEDSGPFSSQS | |
| | | DETSLSTTASSATPTSELLPL | |
| | | GPVDGRSCSMDSAYGTLS | |
| | | PTSLQDFVAPGPMAELVP | |
| | | RAPESPRVPSPPPSPRLRRR | |
| | | TPVQLLSCPPHLLKSKSEAS | |
| | | LLQLLAGAGTHGTPSAPSR | |
| | | SLSELCLAVPAPGIRTQGSP | |
| | | QEAGPSWDCRGAPSPGSG | |
| | | PGLVGCLAGEPAGSHRKRC | |
| | | GDLPSGASPRVQPEPPPGV | |
| | | SAQHRKLTLAQLYRIRTTLL | |
| | | LNSTLTASEV | |
| SEQ ID NO: 1923 | ENSG00000171791.10 | MAHAGRTGYDNREIVMK | A*02:03, A*11:01, A*11:02, |
| | | YIHYKLSQRGYEWDAGDV | A*24:02, A*24:07, A*24:10, |
| | | GAAPPGAAPAPGIFSSQPG | A*33:03, A*34:01, B*15:21, |
| | | HTPHPAASRDPVARTSPLQ | B*27:04, B*40:01, B*40:06, |
| | | TPAAPGAAAGPALSPVPPV | B*46:01, B*55:02, B*58:01, |
| | | VHLTLRQAGDDFSRRYRRD | C*01:02, C*03:02, C*04:01, |
| | | FAEMSSQLHLTPFTARGRF | C*04:03, C*14:02 |
| | | ATVVEELFRDGVNWGRIV | |
| | | AFFEFGGVMCVESVNREM | |
| | | SPLVDNIALWMTEYLNRHL | |
| | | HTWIQDNGGWDAFVELY | |
| | | GPS | |
| SEQ ID NO: 1924 | ENSG00000172765.12 | MKRGTSLHSRRGKPEAPK | A*02:03, A*33:03, C*03:02, |
| | | GSPQINRKSGQEMTAVM | C*03:04 |
| | | QSGRPRSSSTTDAPTSSAM | |
| | | MEIACAAAAAAAACLPGE | |
| | | EGTAE | |
| SEQ ID NO: 1925 | ENSG00000174672.11 | MTSTGKDGGAQHAQYVG | A*02:03, A*11:01, A*11:02, |
| | | PYRLEKTLGKGQTGLVKLG | A*24:02, A*24:10, A*33:03, |
| | | VHCVTCQKVAIKIVNREKLS | B*40:01, C*03:02, C*03:04, |
| | | ESVLMKVEREIAILKLIEHPH | C*14:02 |
| | | VLKLHDVYENKKYLYLVLEH | |
| | | VSGGELFDYLVKKGRLTPK | |
| | | EARKFFRQIISALDFCHSHSI | |
| | | CHRDLKPENLLLDEKNNIRI | |
| | | ADFGMASLQVGDSLLETSC | |
| | | GSPHYACPEVIRGEKYDGR | |
| | | KADVWSCGVILFALLVGAL | |
| | | PFDDDNLRQLLEKVKRGVF | |
| | | HMPHFIPPDCQSLLRGMIE | |
| | | VDAARRLTLEHIQKHIWYI | |
| | | GGKNEPEPEQPIPRKVQIR | |
| | | SLPSLEDIDPDVLDSMHSL | |
| | | GCFRDRNKLLQDLLSEEEN | |
| | | QEKMIYFLLLDRKERYPSQE | |
| | | DEDLPPRNEIDPPRKRVDS | |
| | | PMLNRHGKRRPERKSMEV | |
| | | LSVTDGGSPVPARRAIEMA | |
| | | QHGQSKAMFSKSLDIAEA | |
| | | HPQFSKEDRSRSISGASSGL | |
| | | STSPLSSPRVTPHPSPRGSP | |
| | | LPTPKGTPVHTPKESPAGT | |
| | | PNPTPPSSPSVGGVPWRA | |
| | | RLNSIKNSFLGSPRFHRRKL | |
| | | QVPTPEEMSNLTPESSPEL | |
| | | AKKSWFGNFISLEKEEQIFV | |
| | | VIKDKPLSSIKADIVHAFLSI | |
| | | PSLSHSVISQTSFRAEYKAT | |
| | | GGPAVFQKPVKFQVDITYT | |
| | | EGGEAQKENGIYSVTFTLLS | |
| | | GPSRRFKRVVETIQAQLLST | |
| | | HDPPAAQHLSEPPPPAPGL | |
| | | SWGAGLKGQKVATSYESSL | |
| SEQ ID NO: 1926 | ENSG00000177380.9 | MMCEVMPTISEDGRRGSA | A*02:03, A*11:01, A*11:02, |
| | | LGPDEAGGELERLMVTML | A*24:10, A*33:03, B*15:01, |
| | | TERERLLETLREAQDGLAT | B*39:01, B*40:01, B*58:01, |
| | | AQLRLRELGHEKDSLQRQL | C*03:02, C*03:04, C*03:67, |
| | | SIALPQEFAALTKELNLCRE | C*12:02 |
| | | QLLEREEEIAELKAERNNTR | |
| | | LLLEHLECLVSRHERSLRMT | |
| | | VVKRQAQSPGGVSSEVEV | |
| | | LKALKSLFEHHKALDEKVRE | |
| | | RLRMALERVAVLEEELELS | |
| | | NQETLNLREQLSRRRSGLE | |
| | | EPGKDGDGQTLANGLGPG | |
| | | GDSNRRTAELEEALERQRA | |
| | | EVCQLRERLAVLCRQMSQ | |
| | | LEEELGTAHRELGKAEEAN | |
| | | SKLQRDLKEALAQREDME | |
| | | ERITTLEKRYLSAQREATSL | |
| | | HDANDKLENELASKESLYR | |
| | | QSEEKSRQLAEWLDDAKQ | |
| | | KLQQTLQKAETLPEIEAQLA | |
| | | QRVAALNKAEERHGNFEE | |
| | | RLRQLEAQLEEKNQELQRA | |
| | | RQREKMNDDHNKRLSETV | |
| | | DKLLSESNERLQLHLKERM | |
| | | GALEEKNSLSEEIANMKKL | |
| | | QDELLLNKEQLLAEMERM | |
| | | QMEIDQLRGRPPSSYSRSL | |
| | | PGSALELRYSQAPTLPSGA | |
| | | HLDPYVAGSGRAGKRGR | |
| | | WSGVKEEPSKDWERSAPA | |
| | | GSIPPPFPGELDGSDEEEAE | |
| | | GMFGAELLSPSGQADVQT | |
| | | LAIMLQEQLEAINKEIKLIQE | |
| | | EKETTEQRAEELESRVSSSG | |
| | | LDSLGRYRSSCSLPPSLTTST | |
| | | LASPSPPSSGHSTPRLAPPS | |
| | | PAREGTDKANHVPKEEAG | |
| | | APRGEGPAIPGDTPPPTPR | |
| | | SARLERMTQALALQAGSLE | |
| | | DGGPPRGSEGTPDSLHKA | |
| | | PKKKSIKSSIGRLFGKKEKG | |
| | | RMGPPGRDSSSLAGTPSD | |
| | | ETLATDPLGLAKLTGPGDK | |
| | | DRRNKRKHELLEEACRQGL | |
| | | PFAAWDGPTVVSWLELW | |
| | | VGMPAWYVAACRANVKS | |
| | | GAIMANLSDTEIQREIGISN | |
| | | PLHRLKLRLAIQEMVSLTSP | |
| | | SAPASSRTSTGNVWMTHE | |
| | | EMESLTATTKPILAYGDMN | |
| | | HEWVGNDWLPSLGLPQY | |
| | | RSYFMESLVDARMLDHLN | |
| | | KKELRGQLKMVDSFHRVSL | |
| | | HYGIMCLKRLNYDRKDLER | |
| | | RREESQTQIRDVMVWSNE | |
| | | RVMGWVSGLGLKEFATNL | |
| | | TESGVHGALLALDETFDYS | |
| | | DLALLLQIPTQNAQARQLL | |
| | | EKEFSNLISLGTDRRLDEDS | |
| | | AKSFSRSPSWRKMFREKDL | |
| | | RGVTPDSAEMLPPNFRSA | |
| | | AAGALGSPGLPLRKLQPEG | |
| | | QTSGSSRADGVSVRTYSC | |
| SEQ ID NO: 1927 | ENSG00000177455.7 | MPPPRLLFFLLFLTPMEVR | A*02:03, A*11:01, A*11:02, |
| | | PEEPLVVKVEEGDNAVLQC | A*24:10, B*39:01, B*40:01, |
| | | LKGTSDGPTQQLTWSRES | B*58:01, C*03:02, C*03:04, |
| | | PLKPFLKLSLGLPGLGIHMR | C*12:02, C*14:02, C*15:02 |
| | | PLAIWLFIFNVSQQMGGFY | |
| | | LCQPGPPSEKAWQPGWT | |
| | | VNVEGSGELFRWNVSDLG | |
| | | GLGCGLKNRSSEGPSSPSG | |
| | | KLMSPKLYVWAKDRPEIW | |
| | | EGEPPCLPPRDSLNQSLSQ | |
| | | DLTMAPGSTLWLSCGVPP | |
| | | DSVSRGPLSWTHVHPKGP | |
| | | KSLLSLELKDDRPARDMW | |
| | | VMETGLLLPRATAQDAGK | |
| | | YYCHRGNLTMSFHLEITAR | |
| | | PVLWHWLLRTGGWKVSA | |
| | | VTLAYLIFCLCSLVGILHLQR | |
| | | ALVLRRKRKRMTDPTRRFF | |
| | | KVTPPPGSGPQNQYGNVL | |
| | | SLPTPTSGLGRAQRWAAG | |
| | | LGGTAPSYGNPSSDVQAD | |
| | | GALGSRSPPGVGPEEEEGE | |
| | | GYEEPDSEEDSEFYENDSN | |
| | | LGQDQLSQDGSGYENPED | |
| | | EPLGPEDEDSFSNAESYEN | |
| | | EDEELTQPVARTMDFLSPH | |
| | | GSAWDPSREATSLGSQSYE | |
| | | DMRGILYAAPQLRSIRGQP | |
| | | GPNHEEDADSYENMDNP | |
| | | DGPDPAWGGGGRMGTW | |
| | | STR | |
| SEQ ID NO: 1928 | ENSG00000178209.10 | MVAGMLMPRDQLRAIYE | A*02:03, A*11:01, A*11:02, |
| | | VLFREGVMVAKKDRRPRSL | A*24:02, A*24:10, A*33:03, |
| | | HPHVPGVTNLQVMRAMA | A*34:01, B*55:02, C*03:02, |
| | | SLRARGLVRETFAWCHFY | C*03:04 |
| | | WYLTNEGIAHLRQYLHLPP | |
| | | EIVPASLQRVRRPVAMVM | |
| | | PARRTPHVQAVQGPLGSP | |
| | | PKRGPLPTEEQRVYRRKEL | |
| | | EEVSPETPVVPATTQRTLA | |
| | | RPGPEPAPAT | |
| SEQ ID NO: 1929 | ENSG00000181035.9 | MGNGVKEGPVRLHEDAE | A*02:03, A*11:01, A*11:02, |
| | | AVLSSSVSSKRDHRQVLSSL | A*24:02, A*24:07, A*24:10, |
| | | LSGALAGALAKTAVAPLDR | A*33:03, B*15:01, B*39:01, |
| | | TKIIFQVSSKRFSAKEAFRVL | B*40:01, C*03:02, C*03:04, |
| | | YYTYLNEGFLSLWRGNSAT | C*03:67, C*12:02, C*14:02 |
| | | MVRVVPYAAIQFSAHEEYK | |
| | | RILGSYYGFRGEALPPWPR | |
| | | LFAGALAGTTAASLTYPLDL | |
| | | VRARMAVTPKEMYSNIFH | |
| | | VFIRISREEGLKTLYHGFMP | |
| | | TVLGVIPYAGLSFFTYETLKS | |
| | | LHREYSGRRQPYPFERMIF | |
| | | GACAGLIGQSASYPLDVVR | |
| | | RRMQTAGVTGYPRASIAR | |
| | | TLRTIVREEGAVRGLYKGLS | |
| | | MNWVKGPIAVGISFTTFDL | |
| | | MQILLRHLQS | |
| SEQ ID NO: 1930 | ENSG00000185404.12 | MAGGGSDLSTRGLNGGVS | A*02:03, A*24:10, A*33:03, |
| | | QVANEMNHLPAHSQSLQ | C*03:02 |
| | | RLFTEDQDVDEGLVYDTVF | |
| | | KHFKRHKLEISNAIKKTFPFL | |
| | | EGLRDRELITNK | |
| SEQ ID NO: 1931 | ENSG00000185686.13 | MERRRLWGSIQSRYISMS | A*02:03, A*11:01, A*11:02, |
| | | VWTSPRRLVELAGQSLLKD | A*24:10, A*33:03, B*15:01, |
| | | EALAIAALELLPRELFPPLF | B*39:01, B*40:01, B*58:01, |
| | | MAAFDGRHSQTLKAMVQ | C*03:02, C*03:04, C*14:02 |
| | | AWPFTCLPLGVLMKGQHL | |
| | | HLETFKAVLDGLDVLLAQE | |
| | | VRPRRWKLQVLDLRKNSH | |
| | | QDFWTVWSGNRASLYSFP | |
| | | EPEAAQPMTKKRKVDGLS | |
| | | TEAEQPFIPVEVLVDLFLKE | |
| | | GACDELFSYLIEKVKRKKNV | |
| | | LRLCCKKLKIFAMPMQDIK | |
| | | MILKMVQLDSIEDLEVTCT | |
| | | WKLPTLAKFSPYLGQMINL | |
| | | RRLLLSHIHASSYISPEKEEQ | |
| | | YIAQFTSQFLSLQCLQALYV | |
| | | DSLFFLRGRLDQLLRHVMN | |
| | | PLETLSITNCRLSEGDVMHL | |
| | | SQSPSVSQLSVLSLSGVML | |
| | | TDVSPEPLQALLERASATL | |
| | | QDLVFDECGITDDQLLALL | |
| | | PSLSHCSQLTTLSFYGNSISI | |
| | | SALQSLLQHLIGLSNLTHVL | |
| | | YPVPLESYEDIHGTLHLERL | |
| | | AYLHARLRELLCELGRPSM | |
| | | VWLSANPCPHCGDRTFYD | |
| | | PEPILCPCFMPN | |
| SEQ ID NO: 1932 | ENSG00000185989.9 | MAVEDEGLRVFQSVKIKIG | A*02:03, A*11:01, A*11:02, |
| | | EAKNLPSYPGPSKMRDCYC | A*24:02, A*24:07, A*24:10, |
| | | TVNLDQEEVFRTKIVEKSLC | A*33:03, B*15:01, B*15:27, |
| | | PFYGEDFYCEIPRSFRHLSF | B*39:01, B*40:01, B*58:01, |
| | | YIFDRDVFRRDSIIGKVAIQ | C*03:02, C*03:04, C*07:02, |
| | | KEDLQKYHNRDTWFQLQH | C*12:02, C*14:02 |
| | | VDADSEVQGKVHLELRLSE | |
| | | VITDTGVVCHKLATRIVEC | |
| | | QGLPIVNGQCDPYATVTLA | |
| | | GPFRSEAKKTKVKRKTNNP | |
| | | QFDEVFYFEVTRPCSYSKKS | |
| | | HFDFEEEDVDKLEIRVDLW | |
| | | NASNLKFGDEFLGELRIPLK | |
| | | VLRQSSSYEAWYFLQPRD | |
| | | NGSKSLKPDDLGSLRLNVV | |
| | | YTEDHVFSSDYYSPLRDLLL | |
| | | KSADVEPVSASAAHILGEV | |
| | | CREKQEAAVPLVRLFLHYG | |
| | | RVVPFISAIASAEVKRTQDP | |
| | | NTIFRGNSLASKCIDETMKL | |
| | | AGMHYLHVTLKPAIEEICQ | |
| | | SHKPCEIDPVKLKDGENLE | |
| | | NNMENLRQYVDRVFHAIT | |
| | | ESGVSCPTVMCDIFFSLREA | |
| | | AAKRFQDDPDVRYTAVSSF | |
| | | IFLRFFAPAILSPNLFQLTPH | |
| | | HTDPQTSRTLTLISKTVQTL | |
| | | GSLSKSKSASFKESYMATFY | |
| | | EFFNEQKYADAVKNFLDLIS | |
| | | SSGRRDPKSVEQPIVLKEG | |
| SEQ ID NO: 1933 | ENSG00000196961.8 | MPAVSKGDGMRGLAVFIS | A*02:03, A*11:01, A*11:02, |
| | | DIRNCKSKEAEIKRINKELA | A*24:02, A*24:07, A*24:10, |
| | | NIRSKFKGDKALDGYSKKK | A*33:03, A*34:01, B*15:01, |
| | | YVCKLLFIFLLGHDIDFGHM | B*15:27, B*39:01, B*40:01, |
| | | EAVNLLSSNKYTEKQIGYLFI | B*40:06, B*58:01, C*03:02, |
| | | SVLVNSNSELIRLINNAIKN | C*03:04, C*03:67, C*08:01, |
| | | DLASRNPTFMCLALHCIAN | C*12:02, C*14:02, C*15:02 |
| | | VGSREMGEAFAADIPRILV | |
| | | AGDSMDSVKQSAALCLLRL | |
| | | YKASPDLVPMGEWTARVV | |
| | | HLLNDQHMGVVTAAVSLI | |
| | | TCLCKKNPDDFKTCVSLAV | |
| | | SRLSRIVSSASTDLQDYTYY | |
| | | FVPAPWLSVKLLRLLQCYP | |
| | | PPEDAAVKGRLVECLETVL | |
| | | NKAQEPPKSKKVQHSNAK | |
| | | NAILFETISLIIHYDSEPNLLV | |
| | | RACNQLGQFLQHRETNLR | |
| | | YLALESMCTLASSEFSHEAV | |
| | | KTHIDTVINALKTERDVSVR | |
| | | QRAADLLYAMCDRSNAKQ | |
| | | IVSEMLRYLETADYAIREEIV | |
| | | LKVAILAEKYAVDYSWYVD | |
| | | TILNLIRIAGDYVSEEVWYR | |
| | | VLQIVTNRDDVQGYAAKT | |
| | | VFEALQAPACHENMVKVG | |
| | | GYILGEFGNLIAGDPRSSPP | |
| | | VQFSLLHSKFHLCSVATRAL | |
| | | LLSTYIKFINLFPETKATIQG | |
| | | VLRAGSQLRNADVELQQR | |
| | | AVEYLTLSSVASTDVLATVL | |
| | | EEMPPFPERESSILAKLKRK | |
| | | KGPGAGSALDDGRRDPSS | |
| | | NDINGGMEPTPSTVSTPSP | |
| | | SADLLGLRAAPPPAAPPAS | |
| | | AGAGNLLVDVFDGPAAQP | |
| | | SLGPTPEEAFLSPGPEDIGP | |
| | | PIPEADELLNKFVCKNNGV | |
| | | LFENQLLQIGVKSEFRQNL | |
| | | GRMYLFYGNKTSVQFQNF | |
| | | SPTVVHPGDLQTQLAVQT | |
| | | KRVAAQVDGGAQVQQVL | |
| | | NIECLRDFLTPPLLSVRFRY | |
| | | GGAPQALTLKLPVTINKFF | |
| | | QPTEMAAQDFFQRWKQL | |
| | | SLPQQEAQKIFKANHPMD | |
| | | AEVTKAKLLGFGSALLDNV | |
| | | DPNPENFVGAGIIQTKALQ | |
| | | VGCLLRLEPNAQAQMYRL | |
| | | TLRTSKEPVSRHLCELLAQQ | |
| | | F | |
| SEQ ID NO: 1934 | ENSG00000197530.8 | MAGALRRGRALGSRPSGP | A*02:03, A*11:01, A*11:02, |
| | | TVSSRRSPQCPVAQEGLGA | A*24:02, A*24:07, A*24:10, |
| | | RSRPRVAPRSLARCGPSSRL | A*33:03, B*15:01, B*39:01, |
| | | MGWKPSEARGQSQSFQA | B*40:01, B*58:01, C*03:02, |
| | | SGLQPRSLKAARRATGRPD | C*03:04, C*07:02, C*12:02, |
| | | RSRAAPPNMDPDPQAGV | C*14:02 |
| | | QVGMRVVRGVDWKWGQ | |
| | | QDGGEGGVGTVVELGRH | |
| | | GSPSTPDRTVVVQWDQG | |
| | | TRTNYRAGYQGAHDLLLYD | |
| | | NAQIGVRHPNIICDCCKKH | |
| | | GLRGMRWKCRVCLDYDLC | |
| | | TQCYMHNKHELAHAFDRY | |
| | | ETAHSRPVTLSPRQGLPRIP | |
| | | LRGIFQGAKVVRGPDWE | |
| | | WGSQDGGEGKPGRVVDI | |
| | | RGWDVETGRSVASVTWA | |
| | | DGTTNVYRVGHKGKVDLK | |
| | | CVGEAAGGFYYKDHLPRLG | |
| | | KPAELQRRVSADSQPFQH | |
| | | GDKVKCLLDTDVLREMQE | |
| | | GHGGWNPRMAEFIGQTG | |
| | | TVHRITDRGDVRVQFNHE | |
| | | TRWTFHPGALTKHHSFWV | |
| | | GDVVRVIGDLDTVKRLQA | |
| | | GHGEWTDDMAPALGRVG | |
| | | KVVKVFGDGNLRVAVAGQ | |
| | | RWTFSPSCLVAYRPEEDAN | |
| | | LDVAERARENKSSLSVALD | |
| | | KLRAQKSDPEHPGRLVVEV | |
| | | ALGNAARALDLLRRRPEQV | |
| | | DTKNQGRTALQVAAYLGQ | |
| | | VELIRLLLQARAGVDLPDDE | |
| | | GNTALHYAALGNQPEATR | |
| | | VLLSAGCRADAINSTQSTA | |
| | | LHVAVQRGFLEVVRALCER | |
| | | GCDVNLPDAHSDTPLHSAI | |
| | | SAGTGASGIVEVLTEVPNID | |
| | | VTATNSQGFTLLHHASLKG | |
| | | HALAVRKILARARQLVDAK | |
| | | KEDGFTALHLAALNNHREV | |
| | | AQILIREGRCDVNVRNRKL | |
| | | QSPLHLAVQQAHVGLVPLL | |
| | | VDAGCSVNAEDEEGDTAL | |
| | | HVALQRHQLLPLVADGAG | |
| | | GDPGPLQLLSRLQASGLPG | |
| | | SAELTVGAAVACFLALEGA | |
| | | DVSYTNHRGRSPLDLAAEG | |
| | | RVLKALQGCAQRFRERQA | |
| | | GGGAAPGPRQTLGTPNTV | |
| | | TNLHVGAAPGPEAAECLV | |
| | | CSELALLVLFSPCQHRTVCE | |
| | | ECARRMKKCIRCQVVVSKK | |
| | | LRPDGSEVASAAPAPGPPR | |
| | | QLVEELQSRYRQMEERITC | |
| | | PICIDSHIRLVFQCGHGACA | |
| | | PCGSALSACPICRQPIRDRI | |
| | | QIFV | |
| SEQ ID NO: 1935 | ENSG00000204839.4 | MAGGVWGRSRAREAPVG | A*02:03, A*11:01, A*11:02, |
| | | ALTLTALTEGIRARQGQPQ | A*24:02, A*24:07, A*24:10, |
| | | GPPSAGPQPKSWEVKPEA | A*33:03, B*39:01, B*40:01, |
| | | EPQTQALTAPSEAEPGRGA | B*58:01, C*03:02, C*03:04, |
| | | TVPEAGSEPCSLNSALEPAP | C*14:02 |
| | | EGPHQVPQSSWEEGVLAD | |
| | | LALYTAACLEEAGFAGTQA | |
| | | TVLTLSSALEARGERLEDQV | |
| | | HALVRGLLAQVPSLAEGRP | |
| | | WRAALRVLSALALEHARD | |
| | | VVCALLPRSLPADRVAAEL | |
| | | WRSLSRNQRVNGQVLVQL | |
| | | LWALKGASGPEPQALAAT | |
| | | RALGEMLAVSGCVGATRG | |
| | | FYPHLLLALVTQLHKLARSP | |
| | | CSPDMPKIWVLSHRGPPH | |
| | | SHASCAVEALKALLTGDGG | |
| | | RMVVTCMEQAGGWRRLV | |
| | | GAHTHLEGVLLLASAMVA | |
| | | HADHHLRGLFADLLPRLRS | |
| | | ADDPQRLTAMAFFTGLLQ | |
| | | SRPTARLLREEVILERLLTW | |
| | | QGDPEPTVRWLGLLGLGH | |
| | | LALNRRKVRHVSTLLPALLG | |
| | | ALGEGDARLVGAALGALR | |
| | | RLLLRPRAPVRLLSAELGPR | |
| | | LPPLLDDTRDSIRASAVGLL | |
| | | GTLVRRGRGGLRLGLRGPL | |
| | | RKLVLQSLVPLLLRLHDPSR | |
| | | DAAESSEWTLARCDHAFC | |
| | | WGLLEELVTVAHYDSPEAL | |
| | | SHLCCRLVQRYPGHVPNFL | |
| | | SQTQGYLRSPQDPLRRAA | |
| | | AVLIGFLVHHASPGCVNQD | |
| | | LLDSLFQDLGRLQSDPKPA | |
| | | VAAAAHVSAQQVA | |
| SEQ ID NO: 1936 | ENSG00000205277.5 | MLVIWILTLALRLCASVTTV | A*02:03, A*11:01, A*11:02, |
| | | TPGSTVNTSIGGNTTSASTP | A*24:02, A*24:10, A*33:03, |
| | | SSSDPFTTFSDYGVSVTFIT | B*15:01, B*39:01, B*40:01, |
| | | GSTATKHFLDSSTNSGHSE | B*55:02, B*58:01, C*03:02, |
| | | ESTVSHSGPGATGTTLFPS | C*03:04, C*03:67, C*07:02, |
| | | HSATSVFVGEPKTSPITSAS | C*12:02, C*14:02, C*15:02 |
| | | METTALPGSTTTAGLSEKS | |
| | | TTFYSSPRSPDRTLSPARTT | |
| | | SSGVSEKSTTSHSRPGPTHT | |
| | | IAFPDSTTMPGVSQESTAS | |
| | | HSIPGSTDTTLSPGTTTPSSL | |
| | | GPESTTFHSSPGYTKTTRLP | |
| | | DNTTTSGLLEASTPVHSST | |
| | | GSPHTTLSPSSSTTHEGEPT | |
| | | TFQSWPSSKDTSPAPSGTT | |
| | | SAFVKLSTTYHSSPSSTPTT | |
| | | HFSASSTTLGHSEESTPVHS | |
| | | SPVATATTPPPARSATSGH | |
| | | VEESTAYHRSPGSTQTMHF | |
| | | PESSTTSGHSEESATFHGST | |
| | | THTKSSTPSTTAALAHTSYH | |
| | | SSLGSTETTHFRDSSTISGRS | |
| | | EESKASHSSPDAMATTVLP | |
| | | AGSTPSVLVGDSTPSPISSG | |
| | | SMETTALPGSTTKPGLSEKS | |
| | | TTFYSSPRSPDTTHLPASM | |
| | | TSSGVSEESTTSHSRPGSTH | |
| | | TTAFPGSTTMPGLSQESTA | |
| | | SHSSPGPTDTTLSPGSTTAS | |
| | | SLGPEYTTFHSRPGSTETTL | |
| | | LPDNTTASGLLEASMPVHS | |
| | | STRSPHTTLSPAGSTTRQG | |
| | | ESTTFHSWPSSKDTRPAPP | |
| | | TTTSAFVEPSTTSHGSPSSIP | |
| | | TTHISARSTTSGLVEESTTY | |
| | | HSSPGSTQTMHFPESDTTS | |
| | | GRGEESTTSHSSTTHTISSA | |
| | | PSTTSALVEEPTSYHSSPGS | |
| | | TATTHFPDSSTTSGRSEEST | |
| | | ASHSSQDATGTIVLPARSTT | |
| | | SVLLGESTTSPISSGSMETT | |
| | | ALPGSTTTPGLSERSTTFHS | |
| | | SPRSPATTLSPASTTSSGVS | |
| | | EESTTSRSRPGSTHTTAFPD | |
| | | STTTPGLSRHSTTSHSSPGS | |
| | | TDTTLLPASTTTSGPSQEST | |
| | | TSHSSSGSTDTALSPGSTTA | |
| | | LSFGQESTTFHSNPGSTHT | |
| | | TLFPDSTTSSGIVEASTRVH | |
| | | SSTGSPRTTLSPASSTSPGL | |
| | | QGESTAFQTHPASTHTTPS | |
| | | PPSTATAPVEESTTYHRSP | |
| | | GSTPTTHFPASSTTSGHSEK | |
| | | STIFHSSPDASGTTPSSAHS | |
| | | TTSGRGESTTSRISPGSTEIT | |
| | | TLPGSTTTPGLSEASTTFYSS | |
| | | PRSPTTTLSPASMTSLGVG | |
| | | EESITSRSQPGSTHSTVSPA | |
| | | STTTPGLSEESTTVYSSSRG | |
| | | STETTVFPHSTTTSVHGEEP | |
| | | TTFHSRPASTHTTLFTEDST | |
| | | TSGLTEESTAFPGSPASTQT | |
| | | GLPATLTTADLGEESTTFPS | |
| | | SSGSTGTKLSPARSTTSGLV | |
| | | GESTPSRLSPSSTETTTLPGS | |
| | | PTTPSLSEKSTTFYTSPRSPD | |
| | | ATLSPATTTSSGVSEESSTS | |
| | | HSQPGSTHTTAFPDSTTTS | |
| | | DLSQEPTTSHSSQGSTEATL | |
| | | SPGSTTASSLGQQSTTFHSS | |
| | | PGDTETTLLPDDTITSGLVE | |
| | | ASTPTHSSTGSLHTTLTPAS | |
| | | STSAGLQEESTTFQSWPSS | |
| | | SDTTPSPPGTTAAPVEVST | |
| | | TYHSRPSSTPTTHFSASSTT | |
| | | LGRSEESTTVHSSPGATGT | |
| | | ALFPTRSATSVLVGEPTTSP | |
| | | ISSGSTETTALPGSTTTAGLS | |
| | | EKSTTFYSSPRSPDTTLSPAS | |
| | | TTSSGVSEESTTSHSRPGST | |
| | | HTTAFPGSTTMPGVSQEST | |
| | | ASHSSPGSTDTTLSPGSTTA | |
| | | SSLGPESITFHSSPGSTETT | |
| | | LLPDNTTASGLLEASTPVHS | |
| | | STGSPHTTLSPAGSTTRQG | |
| | | ESTTFQSWPSSKDTMPAP | |
| | | PTTTSAFVELSTTSHGSPSS | |
| | | TPTTHFSASSTTLGRSEEST | |
| | | TVHSSPVATATTPSPARSTT | |
| | | SGLVEESTAYHSSPGSTQT | |
| | | MHFPESSTASGRSEESRTS | |
| | | HSSTTHTISSPPSTTSALVEE | |
| | | PTSYHSSPGSTATTHFPDSS | |
| | | TTSGRSEESTASHSSQDAT | |
| | | GTIVLPARSTTSVLLGESTTS | |
| | | PISSGSMETTALPGSTTTPG | |
| | | LSEKSTTFHSSPRSPATTLSP | |
| | | ASTTSSGVSEESTTSHSRPG | |
| | | STHTTAFPDSTTTPGLSRHS | |
| | | TTSHSSPGSTDTTLLPASTT | |
| | | TSGPSQESTTSHSSPGSTDT | |
| | | ALSPGSTTALSFGQESTTFH | |
| | | SSPGSTHTTLFPDSTTSSGI | |
| | | VEASTRVHSSTGSPRTTLSP | |
| | | ASSTSPGLQGESTAFQTHP | |
| | | ASTHTTPSPPSTATAPVEES | |
| | | TTYHRSPGSTPTTHFPASST | |
| | | TSGHSEKSTIFHSSPDASGT | |
| | | TPSSAHSTTSGRGESTTSRI | |
| | | SPGSTEITTLPGSTTTPGLSE | |
| | | ASTTFYSSPRSPTTTLSPAS | |
| | | MTSLGVGEESTTSRSQPGS | |
| | | THSTVSPASTTTPGLSEEST | |
| | | TVYSSSPGSTETTVFPRTPT | |
| | | TSVRGEEPTTFHSRPASTH | |
| | | TTLFTEDSTTSGLTEESTAFP | |
| | | GSPASTQTGLPATLTTADL | |
| | | GEESTTFPSSSGSTGTTLSP | |
| | | ARSTTSGLVGESTPSRLSPS | |
| | | STETTTLPGSPTTPSLSEKST | |
| | | TFYTSPRSPDATLSPATTTS | |
| | | SGVSEESSTSHSQPGSTHT | |
| | | TAFPDSTTTPGLSRHSTTSH | |
| | | SSPGSTDTTLLPASTTTSGP | |
| | | SQESTTSHSSPGSTDTALSP | |
| | | GSTTALSFGQESTTFHSSPG | |
| | | STHTTLFPDSTTSSGIVEAST | |
| | | RVHSSTGSPRTTLSPASSTS | |
| | | PGLQGESTTFQTHPASTHT | |
| | | TPSPPSTATAPVEESTTYHR | |
| | | SPGSTPTTHFPASSTTSGHS | |
| | | EKSTIFHSSPDASGTTPSSA | |
| | | HSTTSGRGESTTSRISPGST | |
| | | EITTLPGSTTTPGLSEASTTF | |
| | | YSSPRSPTTTLSPASMTSLG | |
| | | VGEESTTSRSQPGSTHSTV | |
| | | SPASTTTPGLSEESTTVYSSS | |
| | | PGSTETTVFPRSTTTSVRGE | |
| | | EPTTFHSRPASTHTTLFTED | |
| | | STTSGLTEESTAFPGSPAST | |
| | | QTGLPATLTTADLGEESTTE | |
| | | PSSSGSTGTTLSPARSTTSG | |
| | | LVGESTPSRLSPSSTETTTLP | |
| | | GSPTTPSLSEKSTTFYTSPRS | |
| | | PDATLSPATTTSSGVSEESS | |
| | | TSHSQPGSTHTTAFPDSTT | |
| | | TSGLSQEPTASHSSQGSTE | |
| | | ATLSPGSTTASSLGQQSTTF | |
| | | HSSPGDTETTLLPDDTITSG | |
| | | LVEASTPTHSSTGSLHTTLT | |
| | | PASSTSAGLQEESTTFQSW | |
| | | PSSSDTTPSPPGTTAAPVE | |
| | | VSTTYHSRPSSTPTTHFSAS | |
| | | STTLGRSEESTTVHSSPGAT | |
| | | GTALFPTRSATSVLVGEPTT | |
| | | SPISSGSTETTALPGSTTTA | |
| | | GLSEKSTTFYSSPRSPDTTLS | |
| | | PASTTSSGVSEESTTSHSRP | |
| | | GSTHTTAFPGSTTMPGVS | |
| | | QESTASHSSPGSTDTTLSP | |
| | | GSTTASSLGPESTTFHSGPG | |
| | | STETTLLPDNTTASGLLEAS | |
| | | TPVHSSTGSPHTTLSPAGST | |
| | | TRQGESTTFQSWPNSKDT | |
| | | TPAPPTTTSAFVELSTTSHG | |
| | | SPSSTPTTHFSASSTTLGRS | |
| | | EESTTVHSSPVATATTPSPA | |
| | | RSTTSGLVEESTTYHSSPGS | |
| | | TQTMHFPESDTTSGRGEES | |
| | | TTSHSSTTHTISSAPSTTSAL | |
| | | VEEPTSYHSSPGSTATTHFP | |
| | | DSSTTSGRSEESTASHSSQ | |
| | | DATGTIVLPARSTTSVLLGE | |
| | | STTSPISSGSMETTALPGST | |
| | | TTPGLSEKSTTFHSSPRSPA | |
| | | TTLSPASTTSSGVSEESTTS | |
| | | HSRPGSTHTTAFPDSTTTP | |
| | | GLSRHSTTSHSSPGSTDTTL | |
| | | LPASTTTSGSSQESTTSHSS | |
| | | SGSTDTALSPGSTTALSFG | |
| | | QESTTFHSSPGSTHTTLFPD | |
| | | STTSSGIVEASTRVHSSTGS | |
| | | PRTTLSPASSTSPGLQGEST | |
| | | AFQTHPASTHTTPSPPSTA | |
| | | TAPVEESTTYHRSPGSTPTT | |
| | | HFPASSTTSGHSEKSTIFHS | |
| | | SPDASGTTPSSAHSTTSGR | |
| | | GESTTSRISPGSTEITTLPGS | |
| | | TTTPGLSEASTTFYSSPRSP | |
| | | TTTLSPASMTSLGVGEESTT | |
| | | SRSQPGSTHSTVSPASTTTP | |
| | | GLSEESTTVYSSSPGSTETT | |
| | | VFPRSTTTSVRREEPTTFHS | |
| | | RPASTHTTLFTEDSTTSGLT | |
| | | EESTAFPGSPASTQTGLPA | |
| | | TLTTADLGEESTTFPSSSGS | |
| | | TGTKLSPARSTTSGLVGEST | |
| | | PSRLSPSSTETTTLPGSPQP | |
| | | SLSEKSTTFYTSPRSPDATLS | |
| | | PATTTSSGVSEESSTSHSQP | |
| | | GSTHTTAFPDSTTTSGLSQ | |
| | | EPTTSHSSQGSTEATLSPGS | |
| | | TTASSLGQQSTTFHSSPGD | |
| | | TETTLLPDDTITSGLVEASTP | |
| | | THSSTGSLHTTLTPASSTST | |
| | | GLQEESTTFQSWPSSSDTT | |
| | | PSPPSTTAVPVEVSTTYHSR | |
| | | PSSTPTTHFSASSTTLGRSE | |
| | | ESTTVHSSPGATGTALFPTR | |
| | | SATSVLVGEPTTSPISSGSTE | |
| | | TTALPGSTTTAGLSEKSTTF | |
| | | YSSPRSPDTTLSPASTTSSG | |
| | | VSEESTTSHSRPGSMHTTA | |
| | | FPSSTTMPGVSQESTASHS | |
| | | SPGSTDTTLSPGSTTASSLG | |
| | | PESTTEHSSPGSTETTLLPD | |
| | | NTTASGLLEASTPVHSSTGS | |
| | | PHTTLSPAGSTTRQGESTT | |
| | | FQSWPNSKDTTPAPPTTTS | |
| | | AFVELSTTSHGSPSSTPTTH | |
| | | FSASSTTLGRSEESTTVHSS | |
| | | PVATATTPSPARSTTSGLVE | |
| | | ESTTYHSSPGSTQTMHFPE | |
| | | SNTTSGRGEESTTSHSSTTH | |
| | | TISSAPSTTSALVEEPTSYHS | |
| | | SPGSTATTHFPDSSTTSGRS | |
| | | EESTASHSSQDATGTIVLPA | |
| | | RSTTSVLLGESTTSPISSGS | |
| | | METTALPGSTTTPGLSEKST | |
| | | TFHSSPSSTPTTHFSASSTTL | |
| | | GRSEESTTVHSSPVATATTP | |
| | | SPARSTTSGLVEESTAYHSS | |
| | | PGSTQTMHFPESSTASGRS | |
| | | EESRTSHSSTTHTISSPPSTT | |
| | | SALVEEPTSYHSSPGSIATT | |
| | | HFPESSTTSGRSEESTASHS | |
| | | SPDTNGITPLPAHFTTSGRI | |
| | | AESTTFYISPGSMETTLAST | |
| | | ATTPGLSAKSTILYSSSRSPD | |
| | | QTLSPASMTSSSISGEPTSL | |
| | | YSQAESTHTTAFPASTTTSG | |
| | | LSQESTTFHSKPGSTETTLS | |
| | | PGSITTSSFAQEFTTPHSQP | |
| | | GSALSTVSPASTTVPGLSEE | |
| | | STTFYSSPGSTETTAFSHSN | |
| | | TMSIHSQQSTPFPDSPGFT | |
| | | HTVLPATLTTTDIGQESTAF | |
| | | HSSSDATGTTPLPARSTAS | |
| | | DLVGEPTTFYISPSPTYTTLF | |
| | | PASSSTSGLTEESTTFHTSPS | |
| | | FTSTIVSTESLETLAPGLCQE | |
| | | GQIWNGKQCVCPQGYVG | |
| | | YQCLSPLESFPVETPEKLNA | |
| | | TLGMTVKVTYRNFTEKMN | |
| | | DASSQEYQNFSTLFKNRM | |
| | | DVVLKGDNLPQYRGVNIR | |
| | | RLLNGSIVVKNDVILEADYT | |
| | | LEVEELFENLAEIVKAKIMN | |
| | | ETRTTLLDPDSCRKAILCYSE | |
| | | EDTFVDSSVTPGFDFQEQC | |
| | | TQKAAEGYTQFYYVDVLD | |
| | | GKLACVNKCTKGTKSQMN | |
| | | CNLGTCQLQRSGPRCLCPN | |
| | | TNTHWYWGETCEFNIAKS | |
| | | LVYGIVGAVMAVLLLALIILI | |
| | | ILFSLSQRKRHREQYDVPQ | |
| | | EWRKEGTPGIFQKTAIWE | |
| | | DQNLRESRFGLENAYNNF | |
| | | RPTLETVDSGTELHIQRPE | |
| | | MVASTV | |
| SEQ ID NO: 1937 | ENSG00000205744.5 | MESRAEGGSPAVFDWFFE | A*02:03, A*11:01, A*11:02, |
| | | AACPASLQEDPPILRQFPP | A*24:10, A*33:03, B*15:01, |
| | | DFRDQEAMQMVPKFCFP | B*39:01, B*40:01, B*55:02, |
| | | FDVEREPPSPAVQHFTFAL | B*58:01, C*03:02, C*03:04, |
| | | TDLAGNRRFGFCRLRAGT | C*14:02 |
| | | QSCLCILSHLPWFEVFYKLL | |
| | | NTVGDLLAQDQVTEAEELL | |
| | | QNLFQQSLSGPQASVGLEL | |
| | | GSGVTVSSGQGIPPPTRGN | |
| | | SKPLSCFVAPDSGRLPSIPE | |
| | | NRNLTELVVAVTDENIVGL | |
| | | FAALLAERRVLLTASKLSTLT | |
| | | SCVHASCALLYPMRWEHV | |
| | | LIPTLPPHLLDYCCAPMPYL | |
| | | IGVHASLAERVREKALEDV | |
| | | VVLNVDANTLETTFNDVQ | |
| | | ALPPDVVSLLRLRLRKVALA | |
| | | PGEGVSRLFLKAQALLFGG | |
| | | YRDALVCSPGQPVTFSEEV | |
| | | FLAQKPGAPLQAFHRRAV | |
| | | HLQLFKQFIEARLEKLNKGE | |
| | | GFSDQFEQEITGCGASSGA | |
| | | LRSYQLWADNLKKGGGAL | |
| | | LHSVKAKTQPAVKNMYRS | |
| | | AKSGLKGVQSLLMYKDGD | |
| | | SVLQRGGSLRAPALPSRSD | |
| | | RLQQRLPITQHFGKNRPLR | |
| | | PSRRRQLEEGTSEPPGAGT | |
| | | PPLSPEDEGCPWAEEALDS | |
| | | SFLGSGEELDLLSEILDSLSM | |
| | | GAKSAGSLRPSQSLDCCHR | |
| | | GDLDSCFSLPNIPRWQPD | |
| | | DKKLPEPEPQPLSLPSLQN | |
| | | ASSLDATSSSKDSRSQLIPS | |
| | | ESDQEVTSPSQSSTASADP | |
| | | SIWGDPKPSPLTEPLILHLT | |
| | | PSHKAAEDSTAQENPTPW | |
| | | LSTAPTEPSPPESPQILAPTK | |
| | | PNFDIAWTSQPLDPSSDPS | |
| | | SLEDPRARPPKALLAERAHL | |
| | | QPREEPGALNSPATPTSNC | |
| | | QKSQPSSRPRVADLKKCFE | |
| | | G | |
| SEQ ID NO: 1938 | ENSG00000213420.3 | MSALRPLLLLLLPLCPGPGP | A*02:03, A*11:01, A*11:02, |
| | | GPGSEAKVTRSCAETRQVL | A*24:02, A*24:10, A*33:03, |
| | | GARGYSLNLIPPALISGEHL | B*15:01, B*15:27, B*38:02, |
| | | RVCPQEYTCCSSETEQRLIR | B*39:01, B*40:01, B*58:01, |
| | | ETEATFRGLVEDSGSFLVHT | C*03:02, C*03:04, C*12:02, |
| | | LAARHRKFDEFFLEMLSVA | C*14:02, C*15:02 |
| | | QHSLTQLFSHSYGRLYAQH | |
| | | ALIFNGLFSRLRDFYGESGE | |
| | | GLDDTLADFWAQLLERVF | |
| | | PLLHPQYSFPPDYLLCLSRL | |
| | | ASSTDGSLQPFGDSPRRLR | |
| | | LQITRTLVAARAFVQGLET | |
| | | GRNVVSEALKVPVSEGCSQ | |
| | | ALMRLIGCPLCRGVPSLMP | |
| | | CQGFCLNVVRGCLSSRGLE | |
| | | PDWGNYLDGLLILADKLQ | |
| | | GPFSFELTAESIGVKISEGL | |
| | | MYLQENSAKVSAQVFQEC | |
| | | GPPDPVPARNRRAPPPRE | |
| | | EAGRLWSMVTEEERPTTA | |
| | | AGTNLHRLVWELRERLAR | |
| | | MRGFWARLSLTVCGDSR | |
| | | MAADASLEAAPCWTGAG | |
| | | RGRYLPPVVGGSPAEQVN | |
| | | NPELKVDASGPDVPTRRRR | |
| | | LQLRAATARMKTAALGHD | |
| | | LDGQDADEDASGSGGGQ | |
| | | QYADDWMAGAVAPPARP | |
| | | PRPPYPPRRDGSGGKGGG | |
| | | GSARYNQGRSRSGGASIGF | |
| | | HTQTILILSLSALALLGPR | |
| SEQ ID NO: 1939 | ENSG00000225485.3 | MNGVAFCLVGIPPRPEPRP | A*02:03, A*11:01, A*11:02, |
| | | PQLPLGPRDGCSPRRPFP | A*24:02, A*24:07, A*24:10, |
| | | WQGPRTLLLYKSPQDGFG | B*15:01, B*39:01, B*40:01, |
| | | FTLRHFIVYPPESAVHCSLK | B*55:02, B*58:01, C*03:02, |
| | | EEENGGRGGGPSPRYRLEP | C*03:04, C*03:67, C*12:02, |
| | | MDTIFVKNVKEDGPAHRA | C*14:02, C*15:02 |
| | | GLRTGDRLVKVNGESVIGK | |
| | | TYSQVIALIQNSDDTLELSI | |
| | | MPKDEDILQLAYSQDAYLK | |
| | | GNEPYSGEARSIPEPPPICY | |
| | | PRKTYAPPARASTRATMVP | |
| | | EPTSALPSDPRSPAAWSDP | |
| | | GLRVPPAARAHLDNSSLG | |
| | | MSQPRPSPGAFPHLSSEPR | |
| | | TPRAFPEPGSRVPPSRLEC | |
| | | QQALSHWLSNQVPRRAG | |
| | | ERRCPAMAPRARSASQDR | |
| | | LEEVAAPRPWPCSTSQDAL | |
| | | SQLGQEGWHRARSDDYLS | |
| | | RATRSAEALGPGALVSPRF | |
| | | ERCGWASQRSSARTPACP | |
| | | TRDLPGPQAPPPSGLQGL | |
| | | DDLGYIGYRSYSPSFQRRT | |
| | | GLLHALSFRDSPFGGLPTF | |
| | | NLAQSPASFPPEASEPPRV | |
| | | VRPEPSTRALEPPAEDRGD | |
| | | EVVLRQKPPTGRKVQLTPA | |
| | | RQMNLGFGDESPEPEASG | |
| | | RGERLGRKVAPLATTEDSL | |
| | | ASIPFIDEPTSPSIDLQAKHV | |
| | | PASAVVSSAMNSAPVLGT | |
| | | SPSSPTFTFTLGRHYSQDCS | |
| | | SIKAGRRSSYLLAITTERSKS | |
| | | CDDGLNTFRDEGRVLRRLP | |
| | | NRIPSLRMLRSFFTDGSLDS | |
| | | WGTSEDADAPSKRHSTSD | |
| | | LSDATFSDIRREGWLYYKQI | |
| | | LTKKGKKAGSGLRQWKRV | |
| | | YAALRARSLSLSKERREPGP | |
| | | AAAGAAAAGAGEDEAAPV | |
| | | CIG | |
| SEQ ID NO: 1940 | ENSG00000243449.2 | MFRAALEDSVEKKSSLKET | A*02:03, A*24:10, A*33:03, |
| | | ETTSKGTSKYDRERETEMK | B*27:04, B*38:02, B*39:01, |
| | | TVMGMKMHFWVRTPAS | B*40:01, C*01:02, C*03:02, |
| | | GRGRGGSDHARSRAAPLP | C*03:04, C*03:67, C*04:01, |
| | | LLA | C*07:02, C*14:02, C*15:02 |
| SEQ ID NO: 1941 | ENSG00000261787.1 | MDRGRPAGSPLSASAEPA | A*02:03, A*24:02, A*24:10, |
| | | PLAAAIRDSRPGRTGPGPA | A*33:03, B*40:01, C*03:02, |
| | | GPGGGSRSGSGRPAAANA | C*03:04, C*12:02, C*14:02 |
| | | ARERSRVQTLRHAFLELQR | |
| | | TLPSVPPDTKLSKLDVLLLA | |
| | | TTYIAHLTRSLQDDAEAPA | |
| | | DAGLGALRGDGYLHPVKK | |
| | | WPMRSRLYIGATGQFLKH | |
| | | SVSGEKTNHDNTPTDSQP | |

TABLE 10
Peptide pools for alternative promoters

| | Peptide | Alternative | | Corresponding |
|---|---|---|---|---|
| SEQ ID NO. | Pool | Promoter | Peptide Sequence | HLA variant |
| SEQ ID NO: | 1 | DNAH3 | MAEKLQEANFLLEDI | A*02:01 |
| 1942 | | | | |
| SEQ ID NO. | | | QYSHIADKVSEVPAN | A*02:03 |
| 1943 | | | | |
| SEQ ID NO: | | | FLKKSSAVTVKLRR | A*03:01 |
| 1944 | | | | |
| SEQ ID NO: | | | PKLKYIPLKFSFTAA | A*24:02 |
| 1945 | | | | |
| SEQ ID NO: | | | EHLHTVNPMMLRLKE | A*33:03 |
| 1946 | | | | |
| SEQ ID NO: | | | VSDFLIQTFKVFQKN | B*15:01 |
| 1947 | | | | |
| SEQ ID NO: | | | DNTAEQNIAAFLKEN | B*40:01 |
| 1948 | | | | |
| SEQ ID NO: | | | VNPMMLRLKELWFAE | B*58:01 |
| 1949 | | | | |
| SEQ ID NO: | | | KTSLTFPGSRPMSPE | C*03:02 |
| 1950 | | | | |
| SEQ ID NO: | | | IEEYFASVASFMSLQ | C*14:02 |
| 1951 | | | | |
| SEQ ID NO: | | | NEIASMNITVPLAMF | C*15:02 |
| 1952 | | | | |
| SEQ ID NO: | 2 | DST | NPKLTLGLIWTIILH | A*02:01 |
| 1953 | | | | |
| SEQ ID NO: | | | FTKWINQHLMKVRKH | A*02:03 |
| 1954 | | | | |
| SEQ ID NO: | | | ERDKVQKKTFTKWIN | A*03:01 |
| 1955 | | | | |
| SEQ ID NO: | | | ISLLEVLSGDTLPRE | B*40:01 |
| 1956 | | | | |
| SEQ ID NO: | | | MAGYLSPAAYLYVEE | C*03:02 |
| 1957 | | | | |
| SEQ ID NO: | | | MAGYLSPAAYLYVE | C*14:02 |
| 1958 | | | | |
| SEQ ID NO: | 3 | EPS8L1 | ADVSQYPVNHLVTFC | A*02:01 |
| 1959 | | | | |
| SEQ ID NO: | | | EVDILNHVFDDVESF | A*02:03 |
| 1960 | | | | |
| SEQ ID NO: | | | MSTATGPEAAPKPSA | A*11:01 |
| 1961 | | | | |
| SEQ ID NO: | | | AQPDVHFFQGLRLGA | A*33:03 |
| 1962 | | | | |
| SEQ ID NO: | | | ILNHVFDDVESFVSR | B*15:02 |
| 1963 | | | | |
| SEQ ID NO: | | | VSQYPVNHLVTFCLG | B*35:03 |
| 1964 | | | | |
| SEQ ID NO: | | | PASKEELESYPLGAI | B*40:01 |
| 1965 | | | | |
| SEQ ID NO: | | | EPERAQPDVHFFQGL | B*58:01 |
| 1966 | | | | |
| SEQ ID NO: | 4 | FRMD4B | VEDLLFSGSRFVWNL | A*02:01 |
| 1967 | | | | |
| SEQ ID NO: | | | LLDLVASHFNLKEKE | A*11:01 |
| 1968 | | | | |
| SEQ ID NO: | | | TVSTLRRWYTERLRA | A*33:03 |
| 1969 | | | | |
| SEQ ID NO: | | | QIEVESETIFKLAAF | B*40:01 |
| 1970 | | | | |
| SEQ ID NO: | | | VWNLTVSTLRRWYTE | B*58:01 |
| 1971 | | | | |
| SEQ ID NO: | | | AVRFYIESISFLKDK | C*07:02 |
| 1972 | | | | |
| SEQ ID NO: | 5 | LAMA3 | AEGVLLDYLVLLPRD | A*02:01 |
| 1973 | | | | |
| SEQ ID NO: | | | SRIAMYELLADADIQ | A*02:03 |
| 1974 | | | | |
| SEQ ID NO: | | | RTNTLLGHLISKAQR | A*03:01 |
| 1975 | | | | |
| SEQ ID NO: | | | VIHFYQAAHPTFPAQ | A*24:02 |
| 1976 | | | | |
| SEQ ID NO: | | | TKATNIRLRFLRTNT | A*33:03 |
| 1977 | | | | |
| SEQ ID NO: | | | YAQMTSVQNDVRITL | A*68:01 |
| 1978 | | | | |
| SEQ ID NO: | | | CLLYQHLPVTRFPCT | B*15:01 |
| 1979 | | | | |
| SEQ ID NO: | | | DKVSSYGGYLTYQAK | B*15:02 |
| 1980 | | | | |
| SEQ ID NO: | | | LSGREVELHLRLRIP | B*40:01 |
| 1981 | | | | |
| SEQ ID NO: | | | LHKKSMDKSLEFITN | B*58:01 |
| 1982 | | | | |
| SEQ ID NO: | | | DGYFALEKSNYFGCQ | C*03:02 |
| 1983 | | | | |
| SEQ ID NO: | | | ENNYYFPDLHHMKYE | C*07:02 |
| 1984 | | | | |
| SEQ ID NO: | | | ILRYVNPGTEAVSGH | C*12:02 |
| 1985 | | | | |
| SEQ ID NO: | | | ADPFSITPGIWVACI | C*15:02 |
| 1986 | | | | |
| SEQ ID NO: | 6 | MET | QNVILHEHHIFLGAT | A*02:01 |
| 1987 | | | | |
| SEQ ID NO: | | | CKEALAKSEMNVNMK | A*02:03 |
| 1988 | | | | |
| SEQ ID NO: | | | MDRSAMCAFPIKYVN | A*11:01 |
| 1989 | | | | |
| SEQ ID NO: | | | TDQVIDVLPEFRDS | A*24:02 |
| 1990 | | | | |
| SEQ ID NO: | | | LDAQTFHTRIIRFCS | A*33:03 |
| 1991 | | | | |
| SEQ ID NO: | | | SNNFIYFLTVQRETL | A*68:01 |
| 1992 | | | | |
| SEQ ID NO: | | | KDGFMFLTDQAYIDV | B*15:01 |
| 1993 | | | | |
| SEQ ID NO: | | | RDSYPIKYVHAFESN | B*35:03 |
| 1994 | | | | |
| SEQ ID NO: | | | QKVAEYKTGPVLEHP | B*40:01 |
| 1995 | | | | |
| SEQ ID NO: | | | CSSKANLSGGVWKDN | B*58:01 |
| 1996 | | | | |
| SEQ ID NO: | | | RDEYRTEFTTALQRV | C*07:02 |
| 1997 | | | | |
| SEQ ID NO: | | | TINSSYFPDHPLHSI | C*12:03 |
| 1998 | | | | |
| SEQ ID NO: | | | PMDRSAMCAFPIKYV | C*15:02 |
| 1999 | | | | |
| SEQ ID NO: | 7 | MIB2 | GASGIVEVLTEVPNI | A*02:01 |
| 2000 | | | | |
| SEQ ID NO: | | | QGFTLLHHASLKGHA | A*03:01 |
| 2001 | | | | |
| SEQ ID NO: | | | ENKSSLSVALDKLRA | A*11:01 |
| 2002 | | | | |
| SEQ ID NO: | | | QVAAYLGQVELIRLL | A*24:02 |
| 2003 | | | | |
| SEQ ID NO: | | | TALHLAALNNHREVA | A*33:03 |
| 2004 | | | | |
| SEQ ID NO: | | | CVGEAAGGFYYKDHL | A*68:01 |
| 2005 | | | | |
| SEQ ID NO: | | | LQRRVSADSQFFQHG | B*15:01 |
| 2006 | | | | |
| SEQ ID NO: | | | GNLRVAVAGQRWTFS | B*58:01 |
| 2007 | | | | |
| SEQ ID NO: | | | EDGFTALHLAALNNH | C*03:02 |
| 2008 | | | | |
| SEQ ID NO: | | | GGFYYKDHLPRLGKP | C*07:02 |
| 2009 | | | | |
| SEQ ID NO: | 8 | MRC2 | DSCYQFNFQSTLSWR | A*02:01 |
| 2010 | | | | |
| SEQ ID NO: | | | TDGSIINFISWAPGK | A*02:03 |
| 2011 | | | | |
| SEQ ID NO: | | | RDCSIALPYVCKKKP | A*11:01 |
| 2012 | | | | |
| SEQ ID NO: | | | EWLRFQEAEYKFFEH | A*24:02 |
| 2013 | | | | |
| SEQ ID NO: | | | SGDEVMYTHWNRDQP | A*33:03 |
| 2014 | | | | |
| SEQ ID NO: | | | RFEQAFVSSLIYNWE | B*15:02 |
| 2015 | | | | |
| SEQ ID NO: | | | GWTWHSPSCYWLGED | B*38:02 |
| 2016 | | | | |
| SEQ ID NO: | | | TNRFEQAFVSSLIYN | B*40:01 |
| 2017 | | | | |
| SEQ ID NO: | | | QGRREWLRFQEAEYK | B*40:06 |
| 2018 | | | | |
| SEQ ID NO: | | | LCALPYHEVYTIQGN | B*51:01 |
| 2019 | | | | |
| SEQ ID NO: | | | CPIKSNDCETFWDKD | B*58:01 |
| 2020 | | | | |
| SEQ ID NO: | | | GGCVALATGSAMGLW | C*03:02 |
| 2021 | | | | |
| SEQ ID NO: | | | EGEYFWTALQDLNST | C*14:02 |
| 2022 | | | | |
| SEQ ID NO: | 9 | NOS2 | PDELLPQAIEFVNQY | A*02:01 |
| 2023 | | | | |
| SEQ ID NO: | | | SKSCLGSIMTPKSLT | A*11:01 |
| 2024 | | | | |
| SEQ ID NO: | | | VKLDATPLSSPRHVR | A*68:01 |
| 2025 | | | | |
| SEQ ID NO: | | | IGRIQWSNLQVFDAR | B*15:01 |
| 2026 | | | | |
| SEQ ID NO: | | | AIEFVNQYYGSFKEA | B*15:02 |
| 2027 | | | | |
| SEQ ID NO: | | | TKEIETTGTYQLTGD | B*40:01 |
| 2028 | | | | |
| SEQ ID NO: | | | MACPWKFLFKTK | B*58:01 |
| 2029 | | | | |
| SEQ ID NO: | 10 | PLEC | RPRSLHPHVPGVTNL | A*02:01 |
| 2030 | | | | |
| SEQ ID NO: | | | MVAGMLMPRDQL | A*11:01 |
| 2031 | | | | |
| SEQ ID NO: | | | HLRQYLHLPPEIVPA | A*24:02 |
| 2032 | | | | |
| SEQ ID NO: | | | RETFAWCHFYWYLTN | C*03:02 |
| 2033 | | | | |
| SEQ ID NO: | 11 | PLEKHG5 | KKKSLGEVLLPVFER | A*02:01 |
| 2034 | | | | |
| SEQ ID NO: | | | LWASVMAPVLEKARR | A*03:01 |
| 2035 | | | | |
| SEQ ID NO: | | | LHTEASYIRKLRVII | A*33:03 |
| 2036 | | | | |
| SEQ ID NO: | | | SLGEVLLPVFERKGI | A*68:01 |
| 2037 | | | | |
| SEQ ID NO: | | | WKNRAASRFSGFFSS | B*15:01 |
| 2038 | | | | |
| SEQ ID NO: | | | KNMSEFLGEASIPGQ | B*40:01 |
| 2039 | | | | |
| SEQ ID NO: | | | GSSGSTNTGDSWKNR | B*58:01 |
| 2040 | | | | |
| SEQ ID NO: | | | TFEAYRFGGHYLRVK | C*14:02 |
| 2041 | | | | |
| SEQ ID NO: | 12 | PTGDS | THHTLWMGLALLGVL | A*02:01 |
| 2042 | | | | |
| SEQ ID NO: | | | HTLWMGLALLGVLGD | A*02:03 |
| 2043 | | | | |
| SEQ ID NO: | | | APEAQVSVQPNFQQD | B*15:01 |
| 2044 | | | | |
| SEQ ID NO: | | | MATHHTLWMGLA | C*03:02 |
| 2045 | | | | |
| SEQ ID NO: | 13 | RASA3 | GPSKMRDCYCTVNLD | A*02:03 |
| 2046 | | | | |
| SEQ ID NO: | | | EIPRSFRHLSFYIFD | A*03:01 |
| 2047 | | | | |
| SEQ ID NO: | | | RYTAVSSFIFLRFFA | A*11:01 |
| 2048 | | | | |
| SEQ ID NO: | | | FKESYMATFYEFFNE | A*24:02 |
| 2049 | | | | |
| SEQ ID NO: | | | LSFYIFDRDVFRRDS | A*33:03 |
| 2050 | | | | |
| SEQ ID NO: | | | KESYMATFYEFFNEQ | B*15:01 |
| 2051 | | | | |
| SEQ ID NO: | | | DADSEVQGKVHLELR | B*40:01 |
| 2052 | | | | |
| SEQ ID NO: | | | DVRYTAVSSFIFLRF | B*58:01 |
| 2053 | | | | |
| SEQ ID NO: | | | DHVFSSDYYSPLRDL | C*03:02 |
| 2054 | | | | |
| SEQ ID NO: | | | GEDFYCEIPRSFRHL | C*07:02 |
| 2055 | | | | |
| SEQ ID NO: | | | SSDYYSPLRDLLLKS | C*14:02 |
| 2056 | | | | |
| SEQ ID NO: | 14 | TRPM2 | HSKLQMHHVAQVLRE | A*02:03 |
| 2057 | | | | |
| SEQ ID NO: | | | RLKSIFRRGLVKVAQ | A*03:01 |
| 2058 | | | | |
| SEQ ID NO: | | | HPTMTAALISNKPEF | A*11:01 |
| 2059 | | | | |
| SEQ ID NO: | | | LLGDFTQPLYPRPRH | A*3303 |
| 2060 | | | | |
| SEQ ID NO: | | | ECGLMKKAALYFSDF | B*15:01 |
| 2061 | | | | |
| SEQ ID NO: | | | VQLKEFYTWDTLLYL | B*40:01 |
| 2062 | | | | |
| SEQ ID NO: | | | MKKAALYFSDFWNKL | B*58:01 |
| 2063 | | | | |
| SEQ ID NO: | | | HVTFTMDPIRDLLIW | C*12:02 |
| 2064 | | | | |
| SEQ ID NO: | | | AALYFSDFWNKLDVG | C*14:02 |
| 2065 | | | | |
| SEQ ID NO: | 15 | IKZF3 | SAAVLNDYSLTKSHE | A*03:01 |
| 2066 | | | | |
| SEQ ID NO: | | | LERHVVSFDSSRPTS | A*33:03 |
| 2067 | | | | |
| SEQ ID NO: | | | LNDYSLTKSHEMENV | C*03:02 |
| 2068 | | | | |

[0187] To explore if somatic promoters might contribute to reducing tumor antigen burden and immunoreactivity in vivo, we proceeded to examine correlations between promoter alterations and intra-tumor T-cell activity in various primary GC cohorts. First, to detect promoter alterations in a cohort of 95 GC-normal pairs (SG cohort), we generated a customized Nanostring panel targeting the top 95 recurrent GC somatic promoters, measuring transcripts associated with either the canonical promoter or the alternative promoter. There was a significant correlation between the Nanostring data and RNA-seq (FIG. 16, r=0.65, P<0.001), with ˜35% of transcripts driven by alternate promoters upregulated in more than half of the GCs (FIG. 4D). Second, to examine markers of T-cell activity in these same GC samples, we analyzed previously published microarray data to measure CD8A (a measure of CD8+ tumor infiltrating lymphocytes), and granzyme A (GZMA) and perforin (PRF1), which are both T-cell effectors and validated markers of T-cell cytolytic activity. We confirmed that these three genes (CD8A, GZMA, and PRF1) were not themselves associated with somatic promoters. Comparing the top and bottom quartiles, GCs with high somatic promoter usage exhibited significantly lower GZMA and PRF1 levels (P<0.001 and P=0.01, Wilcoxon Test) indicating lower T-cell cytolytic activity (FIG. 4E, top left), and also a trend towards lower CD8A levels (P=0.14, Wilcoxon one sided test). Using two different algorithms (ASCAT and ESTIMATE), we further confirmed that the decreased GZMA and PRF1 levels are independent of tumor purity differences between GCs (FIG. 16). Similar results were obtained upon splitting the GC samples based on median promoter usage score (GZMA, P<0.001 and PRF1, P=0.03). Patients with GCs exhibiting high somatic promoter usage (top 25%) also showed poor survival compared to patients with GCs with low somatic promoter usage (bottom 25%) (FIG. 4e top right, HR 2.55, P=0.02). Again, dividing patients by their median somatic promoter usage score also showed similar survival differences (FIG. 11, HR=1.81, P=0.04).

[0188] To validate these findings, we then analyzed two other prominent GC cohorts—one from TCGA, and another from the Asian Cancer Research Group (ACRG). In the TCGA cohort, availability of RNA-seq data allowed us to infer somatic promoter usage directly from next-generation sequencing (NGS) data (FIG. 2c). Similar to the Singapore cohort, TCGA GCs with high somatic promoter usage (top 25%) exhibited decreased CD8A (P=0.002, Wilcoxon one sided test), GZMA (P=0.001, Wilcoxon one sided test) and PRF1 levels (P=0.005, Wilcoxon one sided test, FIG. 4e bottom left) compared to GCs with low somatic promoter usage (bottom 25%) in a manner independent of tumor purity (FIG. 16). Notably, as previous studies have suggested that somatic mutation burden may also correlate with intra-tumor T-cell cytolytic response, we further repeated the analysis after adjusting for the total number of missense mutations in each sample using a regression based approach. Even after correcting for somatic mutation burden, we still observed decreased CD8A (P=0.02, Wilcoxon one sided test), GZMA (P=0.01, Wilcoxon one sided test) and PRF1 expression (P=0.03, Wilcoxon one sided test) in samples with high somatic promoter usage (top 25% against bottom 25%) (FIG. 11).

[0189] We leveraged a third independent cohort of GC samples from ACRG. Using NanoString to target 89 canonical and alternative promoters along with various immune markers, we profiled 264 primary GC samples from the ACRG cohort. 40% of alternative promoter transcripts showed tumor specific expression in more than half of the samples (FIG. 11). Once again, samples with high somatic promoter usage (top 25%) showed significantly lower expression of T-cell cytolytic activity markers including CD8A (P=0.035, Wilcoxon one sided test), CD4A (P=0.005, Wilcoxon one sided test), GZMA (P=0.001, Wilcoxon one sided test) and PRF1 (P=0.025, Wilcoxon one sided test) (FIG. 4e, bottom right) (FIG. 16). Similar results were obtained upon splitting the GC samples based on median promoter usage score (Table 11) Also, after adjusting for mutational burden (for cases where information is available), samples with high somatic promoter usage still showed decreased CD8A (P=0.167, Wilcoxon one sided test), GZMA (P=0.009, Wilcoxon one sided test), and PRF1 (P=0.03, Wilcoxon one sided test) expression (FIG. 11). Taken collectively, these results, observed across multiple GC cohorts and assessed using diverse technologies (microarray, RNA-seq, Nanostring) all support a significant association between somatic promoter usage and reduced tumor immunity levels. Importantly, the decreased levels of T-cell cytolytic activity associated with somatic promoter usage are likely independent of tumor purity and mutational load.

TABLE 11
P values of Wilcoxon test between ACRG samples with
high and low somatic promoter usage.

| | Top and Bottom | Divided by median |
|---|---|---|
| Immune Marker | 25 pctl | (50 pctl) |
| CD4A | 0.01151 | 0.06053 |
| CD8A | 0.07829 | 0.02482 |
| CTLA4 | 0.2048 | 0.2952 |
| FOXP3 | 0.1054 | 0.1673 |
| GZMA | 0.002593 | 0.005957 |
| IFNg | 0.2376 | 0.8045 |
| IL-10 | 0.8391 | 0.9311 |
| LAG3 | 0.1672 | 0.2627 |
| PD1 | 0.1192 | 0.1506 |
| PDL1 | 0.5668 | 0.5869 |
| PRF1 | 0.01272 | 0.05873 |
| TIM3 | 0.578 | 0.9424 |
| TNFA | 0.1394 | 0.7184 |

* All P values are from Wilcoxon two sided test

[0190] Somatic Promoter Associated Peptides are Immunogenic In Vitro

[0191] To functionally test the ability of N-terminal peptides depleted in GC to elicit immune responses, we conducted in-vitro assays using the high-throughput EPIMAX (EPItope MAXimum) platform, which allows multi-epitope testing for both T cell proliferation and cytokine production. First, we identified N terminal peptides predicted to exhibit high HLA-binding affinities across a pool of healthy PBMC (peripheral blood mononuclear cell) donors. Second, selecting 15 alternative promoter-associated peptides for testing, we generated peptide pools for each peptide (Tables 9 and 10, Methods), which were then used to stimulate PBMCs from 9 healthy donors. T cell proliferation and cytokine production levels were measured and benchmarked against control peptides (Table 12). Across all 135 exposures (15 peptides across 9 donors), we observed strong cytokine responses for 79 peptide pools (58%; FC-2 relative to Actin peptides) (FIG. 4g) inducing complex Th1, Th2 and Th17 polarizations in a donor dependent fashion (FIG. 17).

TABLE 12
Cytokine Responses of N terminal Peptides

| | | | | | | | | | | | | | | | | Fold |
|---|---|---|---|---|---|---|---|---|---|---|---|---|---|---|---|---|
| | | | | | | | | | | | | | | | | change |
| | | | | | | | | | | | | | | | | of total |
| | | | | | | | | | | | | | | | | cytokine |
| | | | | | | | | | | | | | | | | response |
| | | | | | | | | | | | | | | | | (normal- |
| | | | | | | | | | | | | | | | | ized |
| | | Analyte concentration (pg/ml) | | | | | | | | | | | | | Total | against |
| | Treat- | GM- | IFN- | IL- | IL- | IL- | IL- | IL- | IL- | IL- | IL- | IL- | | | analytes | Actin |
| Sample | ment | CSF | g | 2 | 3 | 4 | 7 | 9 | 10 | 13 | 15 | 17A | sCD40L | TNFa | (pg/ml) | control) |
| Donor 1 | DNAH3 | 99.39 | 228.45 | 89 | 6.35 | 2.12 | 0.085 | 7.32 | 24.91 | 228.24 | 0.925 | 1.88 | 4.47 | 264.89 | 958.03 | 2.89 |
| Donor 1 | DST | 114.18 | 149.87 | 58.02 | 11.41 | 0.03 | 0.085 | 14.11 | 57.29 | 311.22 | 0.925 | 1.58 | 8.97 | 251.98 | 979.67 | 2.96 |
| Donor 1 | EPS8L1 | 153.07 | 351.34 | 100.97 | 11.8 | 0.03 | 0.085 | 28.88 | 33.71 | 431.94 | 0.925 | 0.02 | 6.17 | 434.22 | 1553.16 | 4.69 |
| Donor 1 | FRMD4B | 55.53 | 121.17 | 76.42 | 10.54 | 0.03 | 1.43 | 16.77 | 36.13 | 198.37 | 0.925 | 0.93 | 3.76 | 186.12 | 708.13 | 2.14 |
| Donor 1 | LAMA3 | 67.29 | 152.66 | 99.6 | 4.83 | 1.72 | 0.085 | 9.11 | 25.85 | 264.85 | 0.925 | 0.02 | 2.8 | 506.25 | 1135.99 | 3.43 |
| Donor 1 | MET | 54.4 | 93.08 | 96.36 | 6.27 | 0.03 | 0.085 | 5.52 | 25.85 | 179.02 | 0.925 | 0.02 | 3.76 | 606.67 | 1071.99 | 3.23 |
| Donor 1 | MIB2 | 97.14 | 201.48 | 94.37 | 5.92 | 0.03 | 0.085 | 18.62 | 27 | 381.6 | 0.925 | 0.67 | 1.81 | 684.34 | 1513.99 | 4.57 |
| Donor 1 | MRC2 | 52.57 | 63.61 | 53.15 | 5.58 | 0.03 | 0.085 | 3.32 | 37.5 | 184.11 | 0.925 | 0.76 | 1.81 | 290.69 | 694.14 | 2.09 |
| Donor 1 | NOS2 | 31.72 | 130.64 | 26.25 | 3.51 | 0.03 | 0.085 | 5.04 | 28.47 | 133.76 | 0.925 | 0.02 | 1.62 | 154.92 | 516.99 | 1.56 |
| Donor 1 | PLEC | 107.71 | 393.6 | 96.29 | 14.5 | 10.68 | 0.085 | 27.93 | 59.1 | 413.41 | 0.925 | 0.02 | 7.78 | 337.55 | 1469.58 | 4.43 |
| Donor 1 | PLEKHG5 | 74.89 | 128.23 | 96.23 | 9.37 | 3.33 | 0.085 | 9.16 | 40.97 | 207.45 | 0.925 | 4.22 | 3.64 | 236.32 | 814.82 | 2.46 |
| Donor 1 | PTGDS | 29.12 | 223.36 | 63.06 | 2.73 | 0.03 | 0.085 | 10.02 | 48.05 | 254.29 | 0.925 | 0.02 | 0.01 | 395.74 | 1027.44 | 3.10 |
| Donor 1 | RASA3 | 33.95 | 50.06 | 58.28 | 3.84 | 0.03 | 0.085 | 8.6 | 39.39 | 196.78 | 0.925 | 0.02 | 0.01 | 157.88 | 549.85 | 1.66 |
| Donor 1 | TRPM2 | 121.32 | 323.62 | 90.23 | 6.24 | 2.53 | 0.085 | 18.26 | 51.65 | 368.92 | 0.925 | 0.02 | 7.61 | 428.91 | 1420.32 | 4.29 |
| Donor 1 | IKZF3 | 9.53 | 59.94 | 23.36 | 0.94 | 0.03 | 0.085 | 1.22 | 42.98 | 76.06 | 0.925 | 0.02 | 0.01 | 48.83 | 263.93 | 0.80 |
| Donor 1 | Actin | 19.75 | 147.18 | 34.21 | 1.46 | 0.03 | 0.085 | 1.22 | 10.1 | 14.2 | 0.925 | 0.02 | 0.78 | 101.44 | 331.40 | 1.00 |
| Donor 2 | DNAH3 | 279.27 | 1324.9 | 24 | 0.5 | 0.03 | 0.085 | 1.22 | 18.44 | 156.05 | 0.925 | 2.26 | 4.59 | 130.71 | 1942.98 | 28.04 |
| Donor 2 | DST | 773.57 | 6732.16 | 46.6 | 2 | 0.03 | 0.085 | 1.22 | 23.76 | 370.78 | 0.925 | 2.56 | 3.88 | 257.33 | 8214.90 | 118.57 |
| Donor 2 | EPS8L1 | 427.99 | 1030.19 | 85.97 | 3.33 | 4.33 | 0.085 | 18.4 | 21.15 | 386.22 | 0.925 | 0.76 | 4.3 | 167.42 | 2151.07 | 31.05 |
| Donor 2 | FRMD4B | 390.31 | 1070.19 | 94.99 | 3.93 | 10.28 | 1.27 | 1.22 | 19.9 | 415.04 | 0.925 | 0.02 | 5.24 | 159.4 | 2172.72 | 31.36 |
| Donor 2 | LAMA3 | 358.14 | 643.22 | 67.18 | 2.34 | 0.03 | 0.085 | 1.22 | 11.66 | 362.67 | 0.925 | 0.02 | 0.17 | 109.58 | 1557.24 | 22.48 |
| Donor 2 | MET | 302.2 | 256.37 | 64.56 | 1.53 | 0.91 | 0.085 | 1.22 | 14.16 | 312.32 | 0.925 | 2.39 | 4.24 | 84.79 | 1045.70 | 15.09 |
| Donor 2 | MIB2 | 173.84 | 141.37 | 17.97 | 0.73 | 0.03 | 0.085 | 1.22 | 13.23 | 153.31 | 0.925 | 0.02 | 0.65 | 61.99 | 565.37 | 8.16 |
| Donor 2 | MRC2 | 1401.1 | 5545.58 | 205.47 | 5.98 | 6.32 | 0.085 | 13.83 | 14.06 | 889.87 | 0.925 | 6.68 | 4.59 | 531.62 | 8626.11 | 124.50 |
| Donor 2 | NOS2 | 342.89 | 462.07 | 83.01 | 2.88 | 10.88 | 2.29 | 15.36 | 21.57 | 288.7 | 0.925 | 5.91 | 3.82 | 89.68 | 1329.99 | 19.20 |
| Donor 2 | PLEC | 280.02 | 357.65 | 74.41 | 2.44 | 0.03 | 0.085 | 19.79 | 24.07 | 343.1 | 0.925 | 5.46 | 2.49 | 83.91 | 1194.38 | 17.24 |
| Donor 2 | PLEKHG5 | 236.12 | 757.03 | 103.14 | 2.69 | 4.13 | 0.085 | 1.22 | 24.39 | 155.22 | 0.925 | 1.54 | 6.63 | 89.39 | 1382.51 | 19.95 |
| Donor 2 | PTGDS | 142.7 | 621.5 | 33.17 | 1.39 | 0.03 | 0.17 | 1.22 | 13.75 | 63.73 | 0.925 | 2.39 | 4.83 | 57.06 | 942.87 | 13.61 |
| Donor 2 | RASA3 | 630.2 | 2755.29 | 67.63 | 0.98 | 4.53 | 0.085 | 15.24 | 36.44 | 363.46 | 0.925 | 0.02 | 3.28 | 281.27 | 4159.35 | 60.03 |
| Donor 2 | TRPM2 | 495.45 | 1211.48 | 60.61 | 2.96 | 0.03 | 0.085 | 2.44 | 5.29 | 542.44 | 0.925 | 0.02 | 3.28 | 143.48 | 2468.49 | 35.63 |
| Donor 2 | IKZF3 | 427.38 | 1705.57 | 71.33 | 1.36 | 0.03 | 0.085 | 21.04 | 43.4 | 419.93 | 0.925 | 0.02 | 4.77 | 116.74 | 2812.58 | 40.59 |
| Donor 2 | Actin | 15.58 | 7.71 | 11.28 | 0.76 | 0.03 | 1.73 | 1.22 | 5.29 | 13.75 | 0.925 | 0.02 | 1.81 | 9.18 | 69.29 | 1.00 |
| Donor 3 | DNAH3 | 42.21 | 664.34 | 19.01 | 0.005 | 0.03 | 0.085 | 1.22 | 5.08 | 15.32 | 0.925 | 0.02 | 0.01 | 29.25 | 777.51 | 4.56 |
| Donor 3 | DST | 100.36 | 273.74 | 14.76 | 0.005 | 0.03 | 0.085 | 1.22 | 27 | 58.89 | 0.925 | 7.41 | 1.17 | 63.68 | 549.28 | 3.22 |
| Donor 3 | EPS8L1 | 208.07 | 530.49 | 41.94 | 1.07 | 3.73 | 0.085 | 1.22 | 13.12 | 107.94 | 0.925 | 0.85 | 0.01 | 50.21 | 959.66 | 5.63 |
| Donor 3 | FRMD4B | 143.55 | 211.78 | 47.51 | 0.73 | 0.03 | 0.085 | 1.22 | 17.71 | 91.8 | 0.925 | 0.02 | 1.11 | 53.79 | 570.26 | 3.35 |
| Donor 3 | LAMA3 | 100.19 | 509.46 | 23.21 | 1.08 | 0.03 | 0.085 | 1.22 | 36.97 | 34.67 | 0.925 | 1.19 | 0.01 | 50.95 | 759.99 | 4.46 |
| Donor 3 | MET | 143.98 | 322.33 | 34.04 | 1.99 | 0.03 | 0.085 | 1.22 | 12.39 | 29.84 | 0.925 | 2.64 | 0.01 | 54.62 | 604.10 | 3.55 |
| Donor 3 | MIB2 | 113.31 | 127.71 | 16.28 | 0.05 | 0.03 | 0.085 | 1.22 | 9.27 | 39.67 | 0.925 | 0.02 | 0.01 | 39.41 | 347.99 | 2.04 |
| Donor 3 | MRC2 | 150.52 | 323.25 | 48.19 | 0.96 | 0.03 | 0.085 | 1.22 | 11.66 | 54.63 | 0.925 | 0.58 | 0.09 | 74.36 | 666.50 | 3.91 |
| Donor 3 | NOS2 | 186.72 | 328.5 | 75.34 | 4.54 | 0.03 | 0.085 | 1.22 | 18.02 | 95.19 | 0.925 | 1.96 | 2.06 | 69.18 | 783.77 | 4.60 |
| Donor 3 | PLEC | 132.57 | 235.34 | 52.69 | 0.76 | 0.03 | 0.085 | 1.22 | 27.21 | 69.82 | 0.925 | 2.93 | 1.05 | 43.28 | 567.91 | 3.33 |
| Donor 3 | PLEKHG5 | 275.71 | 343.92 | 56.78 | 0.69 | 0.03 | 0.085 | 1.22 | 14.06 | 132.99 | 0.925 | 0.49 | 0.01 | 118.75 | 945.66 | 5.55 |
| Donor 3 | PTGDS | 185.73 | 186.82 | 57.3 | 0.005 | 0.28 | 0.085 | 1.22 | 18.44 | 127.35 | 0.925 | 0.02 | 0.01 | 90.73 | 668.92 | 3.93 |
| Donor 3 | RASA3 | 133.59 | 93.84 | 40.44 | 0.01 | 0.06 | 0.085 | 1.22 | 9.68 | 73.67 | 0.925 | 2.3 | 1.49 | 53.69 | 411.00 | 2.41 |
| Donor 3 | TRPM2 | 176.42 | 154.05 | 46.74 | 1.05 | 0.03 | 1.43 | 1.22 | 10.93 | 133.4 | 0.925 | 0.02 | 0.01 | 72 | 598.23 | 3.51 |
| Donor 3 | IKZF3 | 32.69 | 169.24 | 18.82 | 0.005 | 0.03 | 0.085 | 1.22 | 10.52 | 16.55 | 0.925 | 0.02 | 0.01 | 21.41 | 271.53 | 1.59 |
| Donor 3 | Actin | 56.66 | 60.86 | 13.4 | 0.56 | 4.53 | 0.085 | 1.22 | 2.56 | 5.96 | 0.925 | 2.89 | 0.01 | 20.69 | 170.35 | 1.00 |
| Donor 4 | DNAH3 | 0.66 | 0.005 | 2.21 | 0.005 | 0.03 | 0.085 | 1.22 | 0.41 | 0.58 | 0.925 | 0.02 | 0.01 | 2.38 | 8.54 | 1.24 |
| Donor 4 | DST | 1.83 | 1.05 | 1.06 | 0.005 | 0.03 | 0.085 | 1.22 | 3.61 | 2.32 | 0.925 | 0.02 | 0.01 | 19.23 | 31.40 | 4.55 |
| Donor 4 | EPS8L1 | 0.66 | 1.35 | 0.98 | 0.005 | 0.03 | 2.01 | 1.22 | 4.24 | 1.95 | 0.925 | 0.02 | 0.01 | 1.86 | 15.26 | 2.21 |
| Donor 4 | FRMD4B | 0.66 | 0.005 | 2.01 | 0.07 | 0.03 | 0.085 | 1.22 | 2.02 | 1.19 | 0.925 | 0.02 | 0.01 | 0.6 | 8.85 | 1.28 |
| Donor 4 | LAMA3 | 0.66 | 2.26 | 1.99 | 0.005 | 0.03 | 0.085 | 1.22 | 0.09 | 1.25 | 0.925 | 0.02 | 0.01 | 2.34 | 10.89 | 1.58 |
| Donor 4 | MET | 0.66 | 0.3 | 1.19 | 0.005 | 0.03 | 0.085 | 1.22 | 4.77 | 2.69 | 0.925 | 0.13 | 0.01 | 1.61 | 13.63 | 1.98 |
| Donor 4 | MIB2 | 0.66 | 0.005 | 1.6 | 0.005 | 0.03 | 0.085 | 1.22 | 6.55 | 0.03 | 0.925 | 0.02 | 0.01 | 2.12 | 13.26 | 1.92 |
| Donor 4 | MRC2 | 0.66 | 1.05 | 0.98 | 0.005 | 0.03 | 0.085 | 1.22 | 4.77 | 0.3 | 0.925 | 0.02 | 0.01 | 2.08 | 12.14 | 1.76 |
| Donor 4 | NOS2 | 0.66 | 2.49 | 1.02 | 0.005 | 0.03 | 0.085 | 1.22 | 6.55 | 2.14 | 0.925 | 0.02 | 0.01 | 1.47 | 16.63 | 2.41 |
| Donor 4 | PLEC | 1.42 | 0.005 | 1.66 | 0.005 | 0.03 | 0.085 | 1.22 | 5.29 | 0.79 | 0.925 | 0.31 | 0.02 | 16.87 | 28.63 | 4.15 |
| Donor 4 | PLEKHG5 | 0.66 | 0.005 | 1.15 | 0.005 | 0.03 | 0.085 | 1.22 | 3.19 | 1.19 | 0.925 | 0.02 | 0.01 | 0.8 | 9.29 | 1.35 |
| Donor 4 | PTGDS | 0.66 | 3.65 | 2.26 | 0.005 | 0.03 | 0.085 | 1.22 | 3.19 | 2.08 | 0.925 | 0.02 | 0.01 | 10.06 | 24.20 | 3.51 |
| Donor 4 | RASA3 | 0.66 | 0.01 | 2.55 | 0.005 | 0.03 | 0.085 | 1.22 | 3.3 | 1.44 | 0.925 | 0.02 | 0.01 | 1.81 | 12.07 | 1.75 |
| Donor 4 | TRPM2 | 0.66 | 1.35 | 1.32 | 0.005 | 0.03 | 0.085 | 1.22 | 4.98 | 1.05 | 0.925 | 0.02 | 0.01 | 1.7 | 13.36 | 1.94 |
| Donor 4 | IKZF3 | 0.66 | 0.9 | 1.21 | 0.005 | 0.03 | 0.085 | 1.22 | 2.56 | 3.12 | 0.925 | 0.02 | 0.01 | 3.25 | 14.00 | 2.03 |
| Donor 4 | Actin | 0.66 | 0.01 | 1.27 | 0.005 | 0.03 | 0.085 | 1.22 | 0.18 | 0.99 | 0.925 | 0.02 | 0.01 | 1.49 | 6.90 | 1.00 |
| Donor 5 | DNAH3 | 0.66 | 0.005 | 1.66 | 0.84 | 0.03 | 0.085 | 1.22 | 2.87 | 1.05 | 0.925 | 0.27 | 0.01 | 2.82 | 12.45 | 0.78 |
| Donor 5 | DST | 0.66 | 0.6 | 0.79 | 0.005 | 0.03 | 0.085 | 1.22 | 3.61 | 3.18 | 0.925 | 0.02 | 0.01 | 2.06 | 13.20 | 0.82 |
| Donor 5 | EPS8L1 | 0.66 | 0.16 | 1.93 | 0.005 | 0.03 | 1.43 | 1.22 | 3.4 | 1.19 | 0.925 | 0.58 | 0.01 | 3.54 | 15.08 | 0.94 |
| Donor 5 | FRMD4B | 0.66 | 2.03 | 1.71 | 0.005 | 0.03 | 0.085 | 1.22 | 0.09 | 0.3 | 0.925 | 0.02 | 0.01 | 1.86 | 8.95 | 0.56 |
| Donor 5 | LAMA3 | 0.66 | 0.01 | 1.93 | 0.005 | 0.03 | 2.29 | 1.22 | 0.41 | 0.3 | 0.925 | 0.02 | 0.01 | 1.86 | 9.87 | 0.62 |
| Donor 5 | MET | 0.66 | 0.005 | 1.69 | 0.005 | 0.03 | 0.085 | 1.22 | 0.09 | 1.44 | 0.925 | 0.02 | 0.01 | 2.54 | 8.72 | 0.54 |
| Donor 5 | MIB2 | 0.66 | 0.005 | 2.44 | 0.005 | 0.03 | 0.95 | 1.22 | 1.71 | 0.06 | 0.925 | 0.02 | 0.01 | 2.71 | 10.75 | 0.67 |
| Donor 5 | MRC2 | 0.66 | 0.005 | 3.06 | 0.005 | 0.03 | 0.085 | 1.22 | 0.09 | 0.92 | 0.925 | 0.02 | 0.01 | 1.38 | 8.41 | 0.52 |
| Donor 5 | NOS2 | 0.66 | 1.2 | 1.9 | 0.005 | 0.03 | 0.085 | 1.22 | 0.09 | 1.89 | 0.925 | 1.11 | 0.01 | 3.63 | 12.76 | 0.80 |
| Donor 5 | PLEC | 0.66 | 0.01 | 1.56 | 0.005 | 0.03 | 0.085 | 1.22 | 1.28 | 0.03 | 0.925 | 0.85 | 0.01 | 2.06 | 8.73 | 0.54 |
| Donor 5 | PLEKHG5 | 0.66 | 0.005 | 1.77 | 0.54 | 0.49 | 0.085 | 1.22 | 0.09 | 1.19 | 0.925 | 0.93 | 0.01 | 3.21 | 11.13 | 0.69 |
| Donor 5 | PTGDS | 0.66 | 0.005 | 0.48 | 0.005 | 0.03 | 0.085 | 1.22 | 2.66 | 2.57 | 0.925 | 1.71 | 0.01 | 2.08 | 12.44 | 0.78 |
| Donor 5 | RASA3 | 0.66 | 0.3 | 2.21 | 0.005 | 0.03 | 0.085 | 1.22 | 1.49 | 1.44 | 0.925 | 0.02 | 0.01 | 1.9 | 10.30 | 0.64 |
| Donor 5 | TRPM2 | 0.66 | 0.005 | 1.1 | 0.005 | 0.03 | 0.085 | 1.22 | 0.09 | 0.03 | 0.925 | 0.02 | 0.01 | 0.92 | 5.10 | 0.32 |
| Donor 5 | IKZF3 | 0.66 | 4.81 | 2.52 | 0.005 | 0.03 | 2.94 | 1.22 | 4.66 | 0.03 | 0.925 | 0.02 | 0.01 | 1.52 | 19.35 | 1.21 |
| Donor 5 | Actin | 0.66 | 1.65 | 1.4 | 0.005 | 0.03 | 0.085 | 1.22 | 5.5 | 1.44 | 0.925 | 0.02 | 0.01 | 3.08 | 16.03 | 1.00 |
| Donor 6 | DNAH3 | 59.45 | 150.57 | 19.71 | 0.58 | 0.91 | 1.73 | 1.22 | 26.38 | 150.33 | 0.925 | 28.58 | 5.59 | 367.48 | 813.46 | 3.66 |
| Donor 6 | DST | 44.3 | 186.38 | 22.05 | 1.56 | 0.03 | 0.085 | 28.27 | 21.57 | 149.86 | 0.925 | 6.68 | 4.12 | 170.63 | 636.19 | 2.86 |
| Donor 6 | EPS8L1 | 47.7 | 132.54 | 24.08 | 2.42 | 0.03 | 0.085 | 1.22 | 23.24 | 53.62 | 0.925 | 10.24 | 4.59 | 322.88 | 623.57 | 2.81 |
| Donor 6 | FRMD4B | 12.51 | 94.1 | 18.98 | 0.5 | 4.13 | 0.78 | 1.22 | 27 | 33.89 | 0.925 | 0.8 | 0.24 | 24.26 | 219.34 | 0.99 |
| Donor 6 | LAMA3 | 47.4 | 31 | 11.77 | 0.54 | 0.03 | 0.085 | 1.22 | 15 | 48.92 | 0.925 | 8.14 | 0.01 | 254.81 | 419.85 | 1.89 |
| Donor 6 | MET | 36.59 | 255.47 | 19.03 | 1.92 | 0.03 | 0.4 | 1.22 | 59.85 | 64.07 | 0.925 | 3.14 | 4.24 | 56.57 | 503.46 | 2.27 |
| Donor 6 | MIB2 | 28.73 | 46.26 | 15.32 | 1.69 | 7.7 | 0.085 | 1.22 | 16.35 | 44.57 | 0.925 | 1.58 | 0.58 | 202.54 | 367.55 | 1.65 |
| Donor 6 | MRC2 | 30.56 | 173.28 | 11.42 | 0.3 | 0.03 | 0.085 | 1.22 | 15.31 | 25.45 | 0.925 | 13.84 | 2.86 | 70.54 | 345.82 | 1.56 |
| Donor 6 | NOS2 | 70.25 | 513.42 | 21.89 | 2.25 | 0.03 | 1.11 | 1.22 | 72.8 | 117.93 | 1.85 | 2.77 | 2.06 | 197.11 | 1004.69 | 4.52 |
| Donor 6 | PLEC | 52.82 | 69.38 | 21.92 | 1.42 | 0.03 | 0.085 | 1.22 | 20.11 | 58.11 | 0.925 | 16.23 | 2.43 | 262.58 | 507.26 | 2.28 |
| Donor 6 | PLEKHG5 | 23.2 | 140.24 | 15.8 | 0.19 | 0.03 | 0.085 | 1.22 | 20.73 | 55.53 | 0.925 | 1.96 | 0.17 | 136.4 | 396.48 | 1.78 |
| Donor 6 | PTGDS | 44.5 | 194.94 | 14.38 | 1.12 | 0.03 | 0.085 | 1.22 | 30.35 | 54.69 | 0.925 | 6.64 | 2.43 | 125.84 | 477.15 | 2.15 |
| Donor 6 | RASA3 | 67.6 | 91.21 | 19.34 | 1.53 | 0.03 | 0.085 | 7.62 | 43.82 | 212.13 | 0.925 | 14.56 | 2.18 | 273.27 | 734.30 | 3.31 |
| Donor 6 | TRPM2 | 24.72 | 145.01 | 12.57 | 0.005 | 0.03 | 0.085 | 1.22 | 22.4 | 16.66 | 0.925 | 1.5 | 3.28 | 67.52 | 295.93 | 1.33 |
| Donor 6 | IKZF3 | 63.92 | 108.75 | 23.63 | 1.97 | 0.03 | 0.085 | 5.1 | 46.57 | 131.23 | 0.925 | 22.4 | 2.86 | 116.65 | 524.12 | 2.36 |
| Donor 6 | Actin | 18.81 | 135.48 | 11.03 | 0.5 | 0.03 | 0.085 | 1.22 | 4.66 | 8.77 | 0.925 | 2.22 | 0.01 | 38.39 | 222.13 | 1.00 |
| Donor 7 | DNAH3 | 25.1 | 28.72 | 2.1 | 0.005 | 0.03 | 0.085 | 1.22 | 7.49 | 2.45 | 0.925 | 0.02 | 0.09 | 48.76 | 117.00 | 1.64 |
| Donor 7 | DST | 20.84 | 93.16 | 3.11 | 0.005 | 0.03 | 0.085 | 1.22 | 10.1 | 4.73 | 0.925 | 1.02 | 0.01 | 80.77 | 216.01 | 3.03 |
| Donor 7 | EPS8L1 | 1.32 | 0.9 | 2.84 | 0.005 | 0.03 | 0.085 | 1.22 | 3.4 | 0.03 | 0.925 | 0.63 | 0.01 | 7.74 | 19.14 | 0.27 |
| Donor 7 | FRMD4B | 12.7 | 21.99 | 3.25 | 0.005 | 0.03 | 0.085 | 1.22 | 2.66 | 1.7 | 0.925 | 0.02 | 0.01 | 27.73 | 72.33 | 1.01 |
| Donor 7 | LAMA3 | 2.88 | 3.49 | 3.13 | 0.005 | 0.03 | 0.085 | 1.22 | 1.06 | 2.32 | 0.925 | 0.02 | 0.38 | 7.3 | 22.85 | 0.32 |
| Donor 7 | MET | 0.66 | 1.05 | 1.82 | 0.005 | 0.03 | 0.085 | 1.22 | 3.09 | 0.22 | 0.925 | 0.02 | 0.01 | 8.53 | 17.67 | 0.25 |
| Donor 7 | MIB2 | 44.9 | 19.98 | 7.32 | 0.005 | 0.03 | 0.085 | 1.22 | 0.63 | 8.89 | 0.925 | 0.02 | 0.01 | 30.68 | 114.70 | 1.61 |
| Donor 7 | MR2C2 | 4.99 | 6.61 | 2.17 | 0.005 | 0.03 | 0.085 | 1.22 | 0.09 | 2.2 | 0.925 | 0.02 | 0.01 | 15.08 | 33.44 | 0.47 |
| Donor 7 | NOS2 | 64.4 | 61.11 | 9.55 | 0.38 | 0.03 | 2.29 | 1.22 | 3.93 | 10.2 | 0.925 | 0.18 | 0.01 | 29.13 | 183.36 | 2.57 |
| Donor 7 | PLEC | 68.55 | 449.86 | 8.19 | 0.005 | 0.03 | 0.085 | 1.22 | 6.34 | 13.64 | 0.925 | 0.02 | 1.43 | 36.75 | 587.05 | 8.23 |
| Donor 7 | PLEKHG5 | 39.34 | 37.86 | 7.75 | 0.005 | 0.03 | 0.085 | 1.22 | 7.6 | 5.31 | 0.925 | 0.02 | 2.92 | 55.5 | 158.57 | 2.22 |
| Donor 7 | PTGDS | 32.88 | 24.01 | 4.51 | 0.005 | 2.73 | 0.085 | 1.22 | 7.6 | 3.9 | 0.925 | 0.02 | 0.01 | 45.13 | 123.03 | 1.73 |
| Donor 7 | RASA3 | 42.8 | 44.03 | 7.54 | 0.005 | 0.03 | 0.085 | 1.22 | 7.8 | 14.2 | 0.925 | 0.02 | 0.31 | 36.75 | 155.72 | 2.18 |
| Donor 7 | TRPM2 | 29.69 | 140.85 | 2.97 | 0.005 | 0.03 | 0.085 | 1.22 | 25.75 | 3.72 | 0.925 | 0.02 | 0.01 | 124.46 | 329.74 | 4.62 |
| Donor 7 | IKZF3 | 43.4 | 29.69 | 8.26 | 0.005 | 0.03 | 0.085 | 1.22 | 5.71 | 6.88 | 0.925 | 0.02 | 0.45 | 37.8 | 134.48 | 1.89 |
| Donor 7 | Actin | 3.31 | 6.53 | 0.77 | 0.01 | 0.03 | 2.29 | 1.22 | 7.7 | 0.14 | 0.925 | 0.02 | 0.01 | 48.35 | 71.31 | 1.00 |
| Donor 8 | DNAH3 | 110.13 | 191.67 | 72.91 | 1.32 | 0.03 | 4.85 | 3.47 | 9.27 | 105.51 | 0.925 | 0.4 | 0.78 | 121.93 | 623.20 | 47.79 |
| Donor 8 | DST | 58.57 | 75.26 | 15.34 | 0.38 | 0.49 | 0.085 | 1.22 | 12.81 | 45.35 | 0.925 | 0.02 | 2.43 | 79.79 | 292.67 | 22.44 |
| Donor 8 | EPS8L1 | 88.89 | 63.7 | 41.38 | 1.19 | 0.03 | 0.085 | 6.26 | 10.1 | 121.32 | 0.925 | 0.02 | 4.24 | 92.38 | 430.52 | 33.02 |
| Donor 8 | FRMD4B | 29.4 | 65.37 | 9.26 | 0.42 | 0.03 | 0.085 | 6.48 | 8.43 | 53.96 | 0.925 | 0.02 | 1.68 | 53.45 | 229.71 | 17.62 |
| Donor 8 | LAMA3 | 197.84 | 534.58 | 80.04 | 6.66 | 5.92 | 0.085 | 11.96 | 16.25 | 222.4 | 0.925 | 0.49 | 0.01 | 173.02 | 1250.18 | 95.87 |
| Donor 8 | MET | 166.16 | 260.07 | 34.37 | 1.29 | 0.03 | 0.95 | 6.15 | 19.79 | 180.96 | 0.925 | 3.81 | 0.01 | 150.63 | 825.15 | 63.28 |
| Donor 8 | MIB2 | 55.58 | 97.75 | 8.09 | 3.34 | 0.03 | 0.4 | 10.38 | 14.37 | 48.48 | 0.925 | 4.22 | 0.01 | 70.89 | 314.47 | 24.12 |
| Donor 8 | MRC2 | 18.72 | 20.86 | 7.27 | 0.005 | 0.03 | 0.085 | 1.22 | 5.92 | 27.67 | 0.925 | 0.02 | 0.01 | 27.96 | 110.70 | 8.49 |
| Donor 8 | NOS2 | 79.04 | 62.03 | 23.6 | 1.36 | 0.03 | 0.085 | 8.21 | 11.98 | 120.62 | 0.925 | 1.28 | 0.01 | 53.5 | 362.67 | 27.81 |
| Donor 8 | PLEC | 190.8 | 360.99 | 57.12 | 8.89 | 0.03 | 0.085 | 33.62 | 22.19 | 218.93 | 0.925 | 0.67 | 0.58 | 135.11 | 1029.94 | 78.98 |
| Donor 8 | PLEKHG5 | 30.37 | 80.65 | 6.89 | 0.005 | 0.03 | 0.085 | 1.22 | 12.39 | 12.62 | 0.925 | 0.08 | 0.01 | 34.21 | 179.94 | 13.76 |
| Donor 8 | PTGDS | 17.08 | 7.78 | 5.28 | 0.005 | 1.92 | 0.085 | 1.22 | 13.44 | 25.12 | 0.925 | 0.67 | 2.31 | 25.09 | 100.93 | 7.74 |
| Donor 8 | RASA3 | 125.64 | 123.92 | 31.79 | 2.26 | 0.03 | 0.085 | 51.42 | 14.69 | 295.64 | 0.925 | 3.02 | 1.3 | 122.48 | 773.20 | 59.29 |
| Donor 8 | TRPM2 | 24.34 | 6.76 | 9.28 | 0.54 | 0.03 | 0.085 | 1.22 | 10.62 | 36.72 | 0.925 | 0.76 | 0.38 | 38.24 | 129.90 | 9.96 |
| Donor 8 | IKZF3 | 91.55 | 147.61 | 33.66 | 1.15 | 0.03 | 0.085 | 3.39 | 9.16 | 104.46 | 0.925 | 1.02 | 2.8 | 80.67 | 476.51 | 36.54 |
| Donor 8 | Actin | 0.66 | 1.12 | 1.9 | 0.22 | 0.03 | 0.085 | 1.22 | 3.61 | 0.03 | 0.925 | 0.02 | 0.58 | 2.64 | 13.04 | 1.00 |
| Donor 9 | DNAH3 | 18.58 | 8.02 | 1.45 | 0.005 | 0.91 | 0.085 | 1.22 | 12.71 | 4.02 | 0.925 | 0.18 | 0.78 | 106.41 | 155.30 | 2.24 |
| Donor 9 | DST | 18.02 | 15.32 | 3.89 | 0.17 | 0.03 | 0.085 | 1.22 | 8.22 | 1.19 | 0.925 | 0.02 | 0.01 | 64.97 | 114.07 | 1.64 |
| Donor 9 | EPS8L1 | 0.66 | 3.49 | 16.23 | 0.005 | 0.03 | 0.085 | 1.22 | 2.77 | 3.18 | 0.925 | 0.58 | 0.01 | 7.16 | 36.35 | 0.52 |
| Donor 9 | FRMD4B | 5.93 | 3.18 | 2.93 | 0.005 | 0.03 | 0.085 | 1.22 | 0.09 | 0.92 | 0.925 | 0.04 | 0.01 | 12.73 | 28.10 | 0.40 |
| Donor 9 | LAMA3 | 0.66 | 4.03 | 2.75 | 0.005 | 0.03 | 2.01 | 1.22 | 1.28 | 1.51 | 0.925 | 0.02 | 0.01 | 6.68 | 21.13 | 0.30 |
| Donor 9 | MET | 2.43 | 0.005 | 2.88 | 0.005 | 0.03 | 0.085 | 1.22 | 4.66 | 0.92 | 0.925 | 0.02 | 0.01 | 15.76 | 28.95 | 0.42 |
| Donor 9 | MIB2 | 13.91 | 10.55 | 5.42 | 0.005 | 0.03 | 0.085 | 1.22 | 6.55 | 4.25 | 0.925 | 0.02 | 0.01 | 63.45 | 106.43 | 1.53 |
| Donor 9 | MRC2 | 0.66 | 15.32 | 5.84 | 0.005 | 0.03 | 0.085 | 1.22 | 9.06 | 3.42 | 0.925 | 0.02 | 0.01 | 11.63 | 48.23 | 0.69 |
| Donor 9 | NOS2 | 27.96 | 18.69 | 4.86 | 0.005 | 0.03 | 0.085 | 1.22 | 22.19 | 2.01 | 0.925 | 1.19 | 0.01 | 220.43 | 299.61 | 4.32 |
| Donor 9 | PLEC | 3.36 | 4.73 | 2.7 | 0.005 | 0.03 | 2.01 | 1.22 | 1.92 | 0.65 | 0.925 | 0.02 | 0.01 | 15.95 | 33.53 | 0.48 |
| Donor 9 | PLEKHG5 | 1.42 | 1.35 | 2.97 | 0.56 | 4.13 | 0.085 | 1.22 | 4.03 | 0.51 | 0.925 | 0.02 | 0.01 | 8.07 | 25.50 | 0.37 |
| Donor 9 | PTGDS | 9.72 | 1.5 | 2.15 | 0.005 | 0.03 | 0.085 | 1.22 | 5.71 | 1.95 | 0.925 | 0.02 | 0.01 | 47.71 | 71.04 | 1.02 |
| Donor 9 | RASA3 | 2.48 | 6.14 | 2.12 | 0.005 | 0.03 | 0.085 | 1.22 | 4.03 | 0.03 | 0.925 | 1.19 | 0.01 | 14.78 | 33.05 | 0.48 |
| Donor 9 | TRPM2 | 5.56 | 0.9 | 4.77 | 0.38 | 0.03 | 0.085 | 1.22 | 4.03 | 1.32 | 0.925 | 0.02 | 0.01 | 10.04 | 29.29 | 0.42 |
| Donor 9 | IKZF3 | 9.67 | 0.005 | 6.18 | 0.005 | 0.03 | 1.43 | 1.22 | 5.08 | 1.32 | 0.925 | 0.08 | 0.01 | 31.98 | 57.94 | 0.83 |
| Donor 9 | Actin | 0.66 | 3.49 | 0.77 | 0.36 | 0.03 | 2.01 | 1.22 | 2.13 | 1.05 | 0.925 | 0.58 | 0.01 | 56.18 | 69.42 | 1.00 |

[0192] To test the immunogenic capacity of specific N-terminal peptides in a more cellular setting, we then assessed responses of T cells previously primed to recognize either altered or wild-type peptides, when co-cultured with HLA-matched isogenic GC cells expressing either altered or wild-type peptides respectively (FIG. 12). By MHC-I affinity screening, a VMCDIFFSL nonamer in the WT RASA3 N-terminus was predicted to exhibit high MHC-I affinity binding for both the HLA-A02:01 (IC50=6.93 nm) and HLA-A02:06 (IC50=9.74 nm) alleles. Using HLA-A*02:06 T cells that are cross-reactive to HLA-A*02:01-positive AGS cells, we tested release of interferon gamma (IFNγ) from primed T cells after exposure to AGS lysates expressing either RASA3 CanT or SomT isoforms. ELISA assays demonstrated that T cells primed to recognize RASA3 CanT released significantly more IFNγ when co-cultured with RASA3 CanT-expressing AGS cells than when co-cultured with RASA3 SomT-expressing AGS cells. In contrast, T-cells primed with RASA3 SomT did not exhibit appreciable IFNγ release when co-cultured with RASA3 SomT expressing AGS cells, indicating that RASA3 SomT is less immunogenic (FIG. 12). Taken collectively, these in vitro results demonstrate that peptides predicted to be depleted in GCs through somatic promoter alterations can produce immunogenic responses, with the magnitude of immune responses depending on both peptide sequence and host immune background.

[0193] Somatic Promoters are Associated with EZH2 Occupancy

[0194] To identify potential oncogenic mechanisms driving somatic promoter alterations, we intersected the genomic locations of the somatic promoters with transcription factor binding sites (TFBS) of 237 transcription factors from 83 different tissues. Regions exhibiting somatic promoters were significantly enriched in regions associated with EZH2 (P<0.01) and SUZ12 (P<0.01) binding (FIG. 6a, Table 13), confirming earlier findings on a smaller cohort. Both EZH2 and SUZ12 are components of the PRC2 epigenetic regulator complex, which is upregulated in many cancer types including GC. To validate these findings, we then performed EZH2 Chip-sequencing on HFE-145 normal gastric epithelial cells (Methods and Materials). Concordant with the previous findings, we observed significant enrichment of EZH2 binding sites at somatic promoters compared to all promoters (Enrichment score 27 vs. 13 for all promoters, P<0.01), and this EZH2 enrichment remained significant when the gained somatic (Enrichment Score 28, P<0.01) and lost somatic promoters (Enrichment Score 24, P<0.01) were analyzed separately (FIG. 18).

TABLE 13
Somatic Promoters Overlapping EZH2/SUZ12 Binding Sites

| | Annotation | |
|---|---|---|
| Loci | Status | Associated Gene |
| chrX: 136647100- | Known | ZIC3 |
| 136648150 | | |
| chr13: 100634350- | Known | ZIC2 |
| 100638150 | | |
| chr13: 100630200- | Known | ZIC2 |
| 100634000 | | |
| chr20: 50719850- | Known | ZFP64 |
| 50723350 | | |
| chr18: 45660800- | Known | ZBTB7C |
| 45664950 | | |
| chr1: 185226150- | Known | Y_RNA |
| 185227950 | | |
| chr3: 13920600- | Known | WNT7A |
| 13921250 | | |
| chr2: 71126100- | Known | VAX2 |
| 71129800 | | |
| chr5: 6448050- | Known | UBE2QL1 |
| 6451150 | | |
| chr8: 72986650- | Known | TRPA1 |
| 72987850 | | |
| chr22: 17082250- | Known | TPTEP1 |
| 17084550 | | |
| chr19: 55657350- | Known | TNNT1 |
| 55658650 | | |
| chr19: 55666950- | Known | TNNI3 |
| 55668450 | | |
| chr22: 42320400- | Known | TNFRSF13C |
| 42323750 | | |
| chr8: 119962100- | Known | TNFRSF11B |
| 119965650 | | |
| chr21: 42873650- | Known | TMPRSS2 |
| 42881750 | | |
| chr20: 1164650- | Known | TMEM74B |
| 1168700 | | |
| chr17: 53797250- | Known | TMEM100 |
| 53803100 | | |
| chr11: 119291200- | Known | THY1 |
| 119294700 | | |
| chr20: 55203450- | Known | TFAP2C |
| 55206500 | | |
| chr6: 10409250- | Known | TFAP2A; TFAP2A-AS1 |
| 10419650 | | |
| chr6: 85471550- | Known | TBX18 |
| 85475350 | | |
| chr20: 46411750- | Known | SULF2 |
| 46414250 | | |
| chr8: 70403800- | Known | SULF1 |
| 70408450 | | |
| chr5: 172753250- | Known | STC2 |
| 172757450 | | |
| chr14: 38675750- | Known | SSTR1 |
| 38681750 | | |
| chr7: 20824950- | Known | SP8 |
| 20827850 | | |
| chr13: 95362100- | Known | SOX21; SOX21-AS1 |
| 95368650 | | |
| chr3: 181428150- | Known | SOX2 |
| 181434750 | | |
| chr8: 101660950- | Known | SNX31 |
| 101662650 | | |
| chr20: 10197250- | Known | SNAP25; SNAP25-AS1 |
| 10201300 | | |
| chr20: 48598400- | Known | SNAI1 |
| 48604100 | | |
| chr14: 70346050- | Known | SMOC1 |
| 70347700 | | |
| chr12: 85303950- | Known | SLC6A15 |
| 85307700 | | |
| chr19: 17981100- | Known | SLC5A5 |
| 17986400 | | |
| chr2: 228580350- | Known | SLC19A3 |
| 228583450 | | |
| chr3: 121656650- | Known | SLC15A2 |
| 121658300 | | |
| chr6: 100910100- | Known | SIM1 |
| 100913300 | | |
| chr21: 44842150- | Known | SIK1 |
| 44848700 | | |
| chr7: 37953600- | Known | SFRP4 |
| 37956950 | | |
| chr4: 154708850- | Known | SFRP2 |
| 154714150 | | |
| chr16: 23193600- | Known | SCNN1G |
| 23197800 | | |
| chr16: 23312800- | Known | SCNN1B |
| 23315350 | | |
| chr2: 200326950- | Known | SATB2 |
| 200329550 | | |
| chr20: 50415800- | Known | SALL4 |
| 50419950 | | |
| chr20: 981750- | Known | RSPO4 |
| 984100 | | |
| chr1: 148247000- | Known | RP11-89F3.2 |
| 148248800 | | |
| chr12: 54472600- | Known | RP11-834C11.6; RP11- |
| 54477950 | | 834C11.7 |
| chr5: 72746300- | Known | RP11-79P5.7 |
| 72748200 | | |
| chr1: 61103800- | Known | RP11-776H12.1 |
| 61106600 | | |
| chr11: 134335600- | Known | RP11-627G23.1 |
| 134339750 | | |
| chr11: 69830350- | Known | RP11-626H12.1 |
| 69834850 | | |
| chr16: 89987550- | Known | RP11-566K11.4; TUBB3 |
| 89991500 | | |
| chr16: 86319900- | Known | RP11-514D23.1 |
| 86321550 | | |
| chr3: 50191700- | Known | RP11-493K19.3; SEMA3F |
| 50195800 | | |
| chr3: 132756350- | Known | RP11-469L4.1; TMEM108 |
| 132758550 | | |
| chr6: 26613750- | Known | RP11-457M11.6 |
| 26615600 | | |
| chr3: 87841650- | Known | RP11-451B8.1 |
| 87842700 | | |
| chr1: 113391350- | Known | RP11-426L16.8; RP3- |
| 113395900 | | 522D1.1 |
| chr12: 85711250- | Known | RP11-408B11.2 |
| 85713200 | | |
| chr6: 106807450- | Known | RP11-404H14.1 |
| 106809950 | | |
| chr1: 149230550- | Known | RP11-403I13.5 |
| 149232000 | | |
| chr1: 222138950- | Known | RP11-400N13.2 |
| 222144050 | | |
| chr3: 178577000- | Known | RP11-385J1.2 |
| 178578500 | | |
| chr17: 46721450- | Known | RP11-357H14.17 |
| 46725800 | | |
| chr5: 522450- | Known | RP11-310P5.2; SLC9A3 |
| 524750 | | |
| chr15: 80542500- | Known | RP11-2E17.1 |
| 80545200 | | |
| chr5: 74343750- | Known | RP11-229C3.2 |
| 74351250 | | |
| chr5: 63460450- | Known | RNF180 |
| 63463050 | | |
| chr1: 228742450- | Known | RNA5SP19 |
| 228743450 | | |
| chr1: 228781900- | Known | RNA5S17; RNA5SP18 |
| 228785450 | | |
| chr21: 38379100- | Known | RIPPLY3 |
| 38379750 | | |
| chr21: 43180350- | Known | RIPK4 |
| 43189850 | | |
| chr8: 104510350- | Known | RIMS2; RP11-1C8.4 |
| 104514700 | | |
| chr10: 62758000- | Known | RHOBTB1 |
| 62762450 | | |
| chr15: 90039550- | Known | RHCG |
| 90040150 | | |
| chr2: 86564650- | Known | REEP1 |
| 86566000 | | |
| chr4: 82964050- | Known | RASGEF1B; RP11-689K5.3 |
| 82966400 | | |
| chr3: 75707050- | Known | RARRES2P1 |
| 75708850 | | |
| chr8: 85093500- | Known | RALYL |
| 85097700 | | |
| chr8: 128805200- | Known | PVT1 |
| 128810000 | | |
| chr1: 29562850- | Known | PTPRU |
| 29565950 | | |
| chr7: 158378250- | Known | PTPRN2 |
| 158380350 | | |
| chr1: 170630400- | Known | PRRX1; RP1-79C4.4 |
| 170636550 | | |
| chr6: 150463250- | Known | PPP1R14C |
| 150464400 | | |
| chr12: 133264050- | Known | POLE; PXMP2; RP13- |
| 133266950 | | 672B3.2 |
| chr5: 74990850- | Known | POC5 |
| 74992350 | | |
| chr20: 56280450- | Known | PMEPA1 |
| 56287350 | | |
| chr16: 57315850- | Known | PLLP |
| 57319550 | | |
| chr1: 6544500- | Known | PLEKHG5 |
| 6545600 | | |
| chr14: 69950300- | Known | PLEKHD1 |
| 69951550 | | |
| chr1: 201251800- | Known | PKP1 |
| 201254650 | | |
| chr2: 42275400- | Known | PKDCC |
| 42282950 | | |
| chr12: 130823500- | Known | PIWIL1 |
| 130825600 | | |
| chr4: 111557000- | Known | PITX2 |
| 111559350 | | |
| chr7: 32107350- | Known | PDE1C |
| 32111900 | | |
| chr1: 55504650- | Known | PCSK9 |
| 55507550 | | |
| chr15: 102029650- | Known | PCSK6 |
| 102031300 | | |
| chr3: 142606500- | Known | PCOLCE2 |
| 142609050 | | |
| chr14: 37129750- | Known | PAX9 |
| 37133800 | | |
| chr1: 17443850- | Known | PADI2 |
| 17446850 | | |
| chr8: 99951150- | Known | OSR2; RP11-44N12.5; STK3 |
| 99961750 | | |
| chr1: 161991300- | Known | OLFML2B |
| 161994850 | | |
| chr7: 8473050- | Known | NXPH1 |
| 8474100 | | |
| chr9: 87282200- | Known | NTRK2 |
| 87286150 | | |
| chr19: 15309800- | Known | NOTCH3 |
| 15311950 | | |
| chr4: 56500900- | Known | NMU |
| 56504300 | | |
| chr1: 183385400- | Known | NMNAT2 |
| 183388500 | | |
| chr8: 41502400- | Known | NKX6-3 |
| 41510150 | | |
| chr10: 134596450- | Known | NKX6-2; RP11-288G11.3 |
| 134599400 | | |
| chr4: 85417400- | Known | NKX6-1 |
| 85421400 | | |
| chr2: 233791350- | Known | NGEF |
| 233792700 | | |
| chrX: 107016000- | Known | NCBP2L; TSC22D3 |
| 107021000 | | |
| chr11: 1150000- | Known | MUC5AC |
| 1157350 | | |
| chr7: 100607850- | Known | MUC12; MUC3A; RP11- |
| 100613600 | | 395B7.2 |
| chr16: 56699800- | Known | MT1G; MT1H |
| 56705700 | | |
| chr12: 132313150- | Known | MMP17 |
| 132317650 | | |
| chr7: 73036850- | Known | MLXIPL |
| 73039200 | | |
| chr19: 54482850- | Known | MIR935 |
| 54485950 | | |
| chr9: 21554500- | Known | MIR31HG |
| 21561150 | | |
| chr17: 46800050- | Known | MIR3185; PRAC1; PRAC2 |
| 46802400 | | |
| chr1: 1562700- | Known | MIB2 |
| 1565700 | | |
| chr1: 205537050- | Known | MFSD4 |
| 205540700 | | |
| chr13: 31480150- | Known | MEDAG |
| 31483050 | | |
| chr2: 132152200- | Known | MED15P3 |
| 132153000 | | |
| chr3: 150959500- | Known | MED12L |
| 150960300 | | |
| chr2: 149894250- | Known | LYPD6B |
| 149897500 | | |
| chr11: 1889150- | Known | LSP1 |
| 1894600 | | |
| chr1: 156896950- | Known | LRRC71 |
| 156898350 | | |
| chr11: 61275250- | Known | LRRC10B; MIR4488 |
| 61276400 | | |
| chr9: 103789900- | Known | LPPR1 |
| 103792650 | | |
| chr16: 1013250- | Known | LMF1 |
| 1015550 | | |
| chr1: 2980250- | Known | LINC00982; PRDM16 |
| 2991900 | | |
| chr3: 75719150- | Known | LINC00960 |
| 75723200 | | |
| chr20: 21085550- | Known | LINC00237 |
| 21087550 | | |
| chr19: 55127750- | Known | LILRB1 |
| 55130550 | | |
| chr7: 103968400- | Known | LHFPL3 |
| 103969950 | | |
| chr1: 202182400- | Known | LGR6 |
| 202184350 | | |
| chr1: 202161700- | Known | LGR6 |
| 202163400 | | |
| chr1: 65991250- | Known | LEPR |
| 65992850 | | |
| chr1: 205424550- | Known | LEMD1; RP11-576D8.4 |
| 205426850 | | |
| chr20: 9494050- | Known | LAMP5; RP5-1119D9.4 |
| 9498000 | | |
| chr6: 129203450- | Known | LAMA2 |
| 129207800 | | |
| chr19: 51485750- | Known | KLK7 |
| 51487700 | | |
| chr3: 126073900- | Known | KLF15 |
| 126077300 | | |
| chr1: 245315950- | Known | KIF26B |
| 245321950 | | |
| chr1: 180880350- | Known | KIAA1614 |
| 180883200 | | |
| chr15: 81070500- | Known | KIAA1199 |
| 81075050 | | |
| chr20: 43728950- | Known | KCNS1 |
| 43730250 | | |
| chr14: 88788450- | Known | KCNK10 |
| 88791000 | | |
| chr7: 119911950- | Known | KCND2 |
| 119914550 | | |
| chr1: 111210100- | Known | KCNA3 |
| 111218300 | | |
| chr16: 31366400- | Known | ITGAX |
| 31369100 | | |
| chr20: 13200350- | Known | ISM1 |
| 13202100 | | |
| chr16: 54316250- | Known | IRX3 |
| 54322800 | | |
| chr5: 2748900- | Known | IRX2 |
| 2751450 | | |
| chr17: 38016450- | Known | IKZF3 |
| 38022250 | | |
| chr22: 23229500- | Known | IGLC1; IGLJ1; IGLL5 |
| 23237350 | | |
| chr19: 46579500- | Known | IGFL4 |
| 46581300 | | |
| chr7: 45927300- | Known | IGFBP1 |
| 45929150 | | |
| chr7: 23506000- | Known | IGF2BP3 |
| 23515500 | | |
| chr6: 87646350- | Known | HTR1E |
| 87648250 | | |
| chr5: 175084150- | Known | HRH2 |
| 175086850 | | |
| chr3: 11195250- | Known | HRH1 |
| 11198600 | | |
| chr4: 175439400- | Known | HPGD |
| 175445700 | | |
| chr12: 54386800- | Known | HOXC6; HOXC9; HOXC- |
| 54395700 | | AS1; HOXC-AS2 |
| chr12: 54421700- | Known | HOXC6 |
| 54423400 | | |
| chr12: 54410150- | Known | HOXC4; HOXC6; RP11- |
| 54413050 | | 834C11.14 |
| chr12: 54446200- | Known | HOXC4 |
| 54449350 | | |
| chr12: 54331500- | Known | HOXC13; HOXC-AS5 |
| 54334550 | | |
| chr12: 54375250- | Known | HOXC10; HOXC-AS3; RP11- |
| 54381900 | | 834C11.12 |
| chr17: 46701450- | Known | HOXB9 |
| 46705000 | | |
| chr17: 46804450- | Known | HOXB13 |
| 46808100 | | |
| chr7: 27159450- | Known | HOXA3; HOXA-AS2 |
| 27164850 | | |
| chr7: 27208400- | Known | HOXA10; HOXA9; HOXA- |
| 27220700 | | AS4; MIR196B; RP1- |
| | | 170O19.20 |
| chr7: 27221300- | Known | HOTTIP; HOXA11; HOXA11- |
| 27251300 | | AS; HOXA13; RP1- |
| | | 170O19.14 |
| chr12: 54365950- | Known | HOTAIR; HOXC11 |
| 54373250 | | |
| chr1: 6478800- | Known | HES2 |
| 6480950 | | |
| chr11: 2016000- | Known | H19 |
| 2021350 | | |
| chr11: 45942850- | Known | GYLTL1B |
| 45946400 | | |
| chr9: 140056700- | Known | GRIN1 |
| 140058300 | | |
| chr15: 72488700- | Known | GRAMD2 |
| 72491050 | | |
| chr17: 72425800- | Known | GPRC5C |
| 72433550 | | |
| chr5: 89854500- | Known | GPR98 |
| 89855350 | | |
| chrX: 133117900- | Known | GPC3 |
| 133120700 | | |
| chr19: 2700850- | Known | GNG7 |
| 2702900 | | |
| chr7: 99526050- | Known | GJC3; RP4-604G5.1 |
| 99527900 | | |
| chr8: 75230900- | Known | GDAP1; JPH1 |
| 75235150 | | |
| chr7: 74379400- | Known | GATSL1 |
| 74380400 | | |
| chr20: 61046800- | Known | GATA5; RP13-379O24.3 |
| 61052500 | | |
| chr8: 11533800- | Known | GATA4 |
| 11540650 | | |
| chr8: 11557150- | Known | GATA4 |
| 11568950 | | |
| chr11: 11640700- | Known | GALNT18 |
| 11644650 | | |
| chr12: 130645350- | Known | FZD10; FZD10-AS1 |
| 130646800 | | |
| chr6: 96460900- | Known | FUT9 |
| 96466650 | | |
| chr13: 39259850- | Known | FREM2 |
| 39263000 | | |
| chr16: 86600550- | Known | FOXC2; RP11-463O9.5 |
| 86601800 | | |
| chr6: 1608550- | Known | FOXC1 |
| 1611700 | | |
| chr14: 38051900- | Known | FOXA1; TTC6 |
| 38070050 | | |
| chr17: 39965500- | Known | FKBP10; LEPREL4 |
| 39970950 | | |
| chr9: 133813800- | Known | FIBCD1 |
| 133816150 | | |
| chr11: 69630950- | Known | FGF3 |
| 69635350 | | |
| chr3: 13973700- | Known | FGD5P1 |
| 13975200 | | |
| chr10: 95325600- | Known | FFAR4 |
| 95329150 | | |
| chr7: 121942750- | Known | FEZF1; FEZF1-AS1 |
| 121947900 | | |
| chr16: 86529000- | Known | FENDRR |
| 86534050 | | |
| chr21: 42687850- | Known | FAM3B |
| 42691150 | | |
| chr17: 66593700- | Known | FAM20A |
| 66598900 | | |
| chr1: 179711850- | Known | FAM163A |
| 179712600 | | |
| chr8: 53476650- | Known | FAM150A |
| 53479500 | | |
| chr4: 187025100- | Known | FAM149A |
| 187028650 | | |
| chr12: 124778800- | Known | FAM101A |
| 124786100 | | |
| chr7: 27281600- | Known | EVX1; EVX1-AS |
| 27284150 | | |
| chrX: 103498450- | Known | ESX1 |
| 103500200 | | |
| chr1: 216892850- | Known | ESRRG |
| 216898200 | | |
| chr19: 55590850- | Known | EPS8L1 |
| 55593800 | | |
| chr8: 144950100- | Known | EPPK1 |
| 144953650 | | |
| chr17: 48608600- | Known | EPN3 |
| 48615100 | | |
| chr1: 23037600- | Known | EPHB2 |
| 23041300 | | |
| chr9: 112080500- | Known | EPB41L4B |
| 112082950 | | |
| chr7: 155250600- | Known | EN2 |
| 155253200 | | |
| chr19: 14885900- | Known | EMR2 |
| 14888350 | | |
| chr22: 37821950- | Known | ELFN2; RP1-63G5.5 |
| 37823900 | | |
| chr19: 1286150- | Known | EFNA2; MUM1 |
| 1288700 | | |
| chr20: 57874800- | Known | EDN3 |
| 57877300 | | |
| chr15: 45399500- | Known | DUOX2; DUOXA2 |
| 45410700 | | |
| chr16: 30021900- | Known | DOC2A |
| 30023950 | | |
| chr7: 96633500- | Known | DLX6; DLX6-AS1; DLX6-AS2 |
| 96636700 | | |
| chr7: 96652750- | Known | DLX5 |
| 96654900 | | |
| chr19: 6474700- | Known | DENND1C |
| 6477300 | | |
| chr10: 94831200- | Known | CYP26A1 |
| 94834300 | | |
| chr4: 48987500- | Known | CWH43 |
| 48989500 | | |
| chr8: 104382100- | Known | CTHRC1 |
| 104385900 | | |
| chr5: 174177950- | Known | CTD-2532K18.1; MIR4634 |
| 174179050 | | |
| chr14: 19924450- | Known | CTD-2314B22.3 |
| 19925600 | | |
| chr14: 19640850- | Known | CTD-2314B22.1 |
| 19641750 | | |
| chr15: 97838750- | Known | CTD-2147F2.1 |
| 97841300 | | |
| chr5: 134912900- | Known | CTC-321K16.1; CXCL14 |
| 134915350 | | |
| chr5: 134371700- | Known | CTC-276P9.1 |
| 134375750 | | |
| chr16: 21288600- | Known | CRYM |
| 21290700 | | |
| chr2: 102002650- | Known | CREG2 |
| 102005250 | | |
| chr15: 78632500- | Known | CRABP1 |
| 78634200 | | |
| chr3: 9745600- | Known | CPNE9 |
| 9747050 | | |
| chr16: 89640950- | Known | CPNE7 |
| 89643950 | | |
| chr3: 99355450- | Known | COL8A1 |
| 99359900 | | |
| chr6: 33160200- | Known | COL11A2 |
| 33161450 | | |
| chr6: 35754500- | Known | CLPSL1 |
| 35755750 | | |
| chr21: 36041150- | Known | CLIC6 |
| 36045150 | | |
| chr17: 7161850- | Known | CLDN7; RP1-4G17.5 |
| 7167950 | | |
| chr7: 73181100- | Known | CLDN3 |
| 73185850 | | |
| chr3: 190034900- | Known | CLDN1; CLDN16 |
| 190041800 | | |
| chr7: 29184550- | Known | CHN2; CPVL |
| 29187650 | | |
| chr2: 27340450- | Known | CGREF1 |
| 27342750 | | |
| chr13: 28538700- | Known | CDX2 |
| 28543950 | | |
| chr5: 149545100- | Known | CDX1 |
| 149550500 | | |
| chr16: 68677900- | Known | CDH3; RP11-615I2.2 |
| 68681200 | | |
| chr16: 68770300- | Known | CDH1 |
| 68774200 | | |
| chr11: 6279800- | Known | CCKBR |
| 6283200 | | |
| chr18: 57363700- | Known | CCBE1; RP11-2N1.2 |
| 57365350 | | |
| chr8: 76189900- | Known | CASC9 |
| 76191050 | | |
| chr6: 17392850- | Known | CAP2 |
| 17396100 | | |
| chr1: 20808950- | Known | CAMK2N1 |
| 20814450 | | |
| chr7: 44265350- | Known | CAMK2B |
| 44266400 | | |
| chr8: 86350000- | Known | CA3 |
| 86351450 | | |
| chr5: 2751850- | Known | C5orf38; IRX2 |
| 2754050 | | |
| chr3: 138664900- | Known | C3orf72; FOXL2 |
| 138667100 | | |
| chr17: 77019250- | Known | C1QTNF1; C1QTNF1-AS1 |
| 77024000 | | |
| chr1: 223565950- | Known | C1orf65 |
| 223567600 | | |
| chr1: 190440800- | Known | BRINP3; RP11- |
| 190450200 | | 161I10.1; RP11-547I7.2 |
| chr2: 198650550- | Known | BOLL |
| 198651850 | | |
| chr15: 83952250- | Known | BNC1 |
| 83953300 | | |
| chr4: 42152300- | Known | BEND4 |
| 42155900 | | |
| chr17: 47209750- | Known | B4GALNT2 |
| 47211400 | | |
| chr11: 134279600- | Known | B3GAT1 |
| 134282050 | | |
| chr4: 94748600- | Known | ATOH1 |
| 94754050 | | |
| chr9: 120175650- | Known | ASTN2 |
| 120177900 | | |
| chr9: 133319400- | Known | ASS1 |
| 133324650 | | |
| chr11: 2285750- | Known | ASCL2 |
| 2292550 | | |
| chr16: 329250- | Known | ARHGDIG |
| 332250 | | |
| chr8: 145908800- | Known | ARHGAP39 |
| 145912600 | | |
| chr4: 86395150- | Known | ARHGAP24 |
| 86399900 | | |
| chr18: 24443050- | Known | AQP4; AQP4-AS1 |
| 24445900 | | |
| chr11: 71318250- | Known | AP000867.1 |
| 71320050 | | |
| chr5: 79864800- | Known | ANKRD34B |
| 79866650 | | |
| chr2: 133014850- | Known | ANKRD30BL; MIR663B |
| 133015750 | | |
| chr12: 85672750- | Known | ALX1 |
| 85675650 | | |
| chr6: 168195400- | Known | AL009178.1; C6orf123 |
| 168198750 | | |
| chr10: 4867450- | Known | AKR1E2 |
| 4870200 | | |
| chr16: 3232300- | Known | AJ003147.8 |
| 3234150 | | |
| chr8: 11203650- | Known | AF131216.5; TDH |
| 11206800 | | |
| chr17: 15847250- | Known | ADORA2B |
| 15850800 | | |
| chr7: 5601050- | Known | ACTB |
| 5603800 | | |
| chr7: 100490350- | Known | ACHE |
| 100495550 | | |
| chr3: 18734950- | Known | AC144521.1 |
| 18736300 | | |
| chr2: 131593950- | Known | AC133785.1; ARHGEF4 |
| 131595800 | | |
| chr4: 44447900- | Known | AC131951.1; KCTD8 |
| 44452050 | | |
| chr17: 7982650- | Known | AC129492.6; ALOX12B |
| 7984350 | | |
| chr5: 1003400- | Known | AC116351.2; RP11- |
| 1005850 | | 43F13.4 |
| chr2: 100721300- | Known | AC092667.2; AFF3 |
| 100722600 | | |
| chr2: 286750- | Known | AC079779.4; FAM150B |
| 288600 | | |
| chr2: 132121200- | Known | AC073869.1 |
| 132122150 | | |
| chr2: 233282700- | Known | AC068134.5; AC068134.6 |
| 233286450 | | |
| chr16: 31495650- | Known | AC026471.6; SLC5A2 |
| 31500700 | | |
| chr12: 54348250- | Known | AC012531.23; HOXC12 |
| 54351050 | | |
| chr2: 118561200- | Known | AC009312.1 |
| 118562150 | | |
| chr16: 51182700- | Known | AC009166.5; SALL1 |
| 51185700 | | |
| chr2: 171671550- | Known | AC007405.8; GAD1 |
| 171676200 | | |
| chr2: 66801200- | Known | AC007392.3 |
| 66811950 | | |
| chr2: 71113350- | Known | AC007040.5 |
| 71116800 | | |
| chr7: 15720950- | Known | AC005550.4; MEOX2 |
| 15728900 | | |
| chr6: 1611750- | Unknown | — |
| 1616000 | | |
| chr15: 96958950- | Unknown | — |
| 96961350 | | |
| chr2: 66652100- | Unknown | — |
| 66655200 | | |
| chr2: 8833050- | Unknown | — |
| 8834200 | | |
| chr9: 17905350- | Unknown | — |
| 17908250 | | |
| chr5: 2746900- | Unknown | — |
| 2748550 | | |
| chr7: 45001800- | Unknown | — |
| 45003250 | | |
| chr12: 52257150- | Unknown | — |
| 52258000 | | |
| chr2: 218874000- | Unknown | — |
| 218875450 | | |
| chr19: 30214300- | Unknown | — |
| 30216100 | | |
| chr8: 140717350- | Unknown | — |
| 140719650 | | |
| chr7: 27264550- | Unknown | — |
| 27266100 | | |
| chr19: 48900250- | Unknown | — |
| 48904400 | | |
| chr16: 51186150- | Unknown | — |
| 51187850 | | |
| chr9: 132458700- | Unknown | — |
| 132461300 | | |
| chr11: 44337850- | Unknown | — |
| 44339250 | | |
| chr17: 46694850- | Unknown | — |
| 46697150 | | |
| chr10: 124898400- | Unknown | — |
| 124900700 | | |
| chr6: 10382900- | Unknown | — |
| 10384750 | | |
| chr8: 144489000- | Unknown | — |
| 144490750 | | |
| chr20: 49837550- | Unknown | — |
| 49839250 | | |
| chr3: 193921100- | Unknown | — |
| 193922050 | | |
| chr13: 100619800- | Unknown | — |
| 100623100 | | |
| chr1: 165320950- | Unknown | — |
| 165322700 | | |
| chr1: 180203650- | Unknown | — |
| 180205650 | | |
| chr1: 23543800- | Unknown | — |
| 23544900 | | |
| chr8: 144842350- | Unknown | — |
| 144844000 | | |
| chr5: 174162150- | Unknown | — |
| 174163450 | | |
| chr1: 184632450- | Unknown | — |
| 184634700 | | |
| chr13: 21295150- | Unknown | — |
| 21296450 | | |
| chr1: 156893100- | Unknown | — |
| 156894550 | | |
| chr20: 46434400- | Unknown | — |
| 46435400 | | |
| chr11: 33398050- | Unknown | — |
| 33400750 | | |
| chr6: 134216650- | Unknown | — |
| 134218050 | | |
| chr2: 45176050- | Unknown | — |
| 45177700 | | |
| chr13: 36044350- | Unknown | — |
| 36045800 | | |
| chr2: 45227500- | Unknown | — |
| 45229600 | | |
| chr10: 43427950- | Unknown | — |
| 43429950 | | |
| chr1: 152079200- | Unknown | — |
| 152081300 | | |
| chr7: 54731350- | Unknown | — |
| 54733200 | | |
| chr20: 4201500- | Unknown | — |
| 4202700 | | |
| chr8: 145555300- | Unknown | — |
| 145556800 | | |
| chr7: 64733800- | Unknown | — |
| 64735500 | | |
| chrX: 119124000- | Unknown | — |
| 119127100 | | |
| chr3: 14642850- | Unknown | — |
| 14644150 | | |
| chr10: 102488400- | Unknown | — |
| 102492200 | | |
| chr5: 42999400- | Unknown | — |
| 43001150 | | |
| chr21: 38063750- | Unknown | — |
| 38066650 | | |
| chr2: 131010400- | Unknown | — |
| 131011600 | | |
| chr19: 30018700- | Unknown | — |
| 30020150 | | |
| chr5: 72731550- | Unknown | — |
| 72734700 | | |
| chr8: 102092150- | Unknown | — |
| 102094400 | | |
| chr4: 4867350- | Unknown | — |
| 4869600 | | |
| chr4: 4854350- | Unknown | — |
| 4855850 | | |
| chr7: 156735150- | Unknown | — |
| 156736500 | | |
| chr1: 161442450- | Unknown | — |
| 161443650 | | |
| chr12: 54356450- | Unknown | — |
| 54358100 | | |
| chr1: 48174300- | Unknown | — |
| 48176650 | | |
| chr7: 25900700- | Unknown | — |
| 25903050 | | |
| chr10: 102830000- | Unknown | — |
| 102833650 | | |
| chr6: 137310350- | Unknown | — |
| 137312150 | | |
| chr1: 152081400- | Unknown | — |
| 152084100 | | |
| chr7: 27274550- | Unknown | — |
| 27276500 | | |
| chr12: 113904650- | Unknown | — |
| 113906650 | | |
| chr1: 17024500- | Unknown | — |
| 17028900 | | |
| chr5: 72528750- | Unknown | — |
| 72529950 | | |
| chr9: 99481850- | Unknown | — |
| 99483650 | | |
| chr1: 46954600- | Unknown | — |
| 46956800 | | |
| chr17: 26119900- | Unknown | — |
| 26121850 | | |
| chr1: 2253650- | Unknown | — |
| 2254650 | | |
| chr7: 73060250- | Unknown | — |
| 73063150 | | |
| chr19: 1754200- | Unknown | — |
| 1758750 | | |
| chr9: 29211200- | Unknown | — |
| 29215700 | | |
| chr7: 31375200- | Unknown | — |
| 31377000 | | |
| chr1: 165344500- | Unknown | — |
| 165346650 | | |
| chr10: 57389650- | Unknown | — |
| 57391700 | | |
| chr1: 163441550- | Unknown | — |
| 163443100 | | |
| chr1: 200842700- | Unknown | — |
| 200844850 | | |
| chr20: 44639000- | Unknown | — |
| 44640950 | | |
| chr2: 176952400- | Unknown | — |
| 176953750 | | |
| chr20: 6031700- | Unknown | — |
| 6033850 | | |
| chr5: 2738550- | Unknown | — |
| 2740800 | | |
| chr3: 74662150- | Unknown | — |
| 74664400 | | |
| chr10: 134600350- | Unknown | — |
| 134602350 | | |
| chr1: 152084900- | Unknown | — |
| 152085650 | | |
| chr8: 52520450- | Unknown | — |
| 52521550 | | |
| chr1: 121279850- | Unknown | — |
| 121280850 | | |
| chr13: 37729350- | Unknown | — |
| 37731000 | | |
| chr7: 8390700- | Unknown | — |
| 8392150 | | |
| chr12: 32818500- | Unknown | — |
| 32820350 | | |
| chr16: 15350450- | Unknown | — |
| 15351950 | | |
| chr2: 58342200- | Unknown | — |
| 58346950 | | |
| chr3: 112383300- | Unknown | — |
| 112384750 | | |
| chr19: 1682300- | Unknown | — |
| 1683350 | | |
| chr4: 27077050- | Unknown | — |
| 27078000 | | |
| chr8: 23507850- | Unknown | — |
| 23509050 | | |
| chr4: 10782250- | Unknown | — |
| 10783600 | | |
| chr17: 12927950- | Unknown | — |
| 12928650 | | |
| chr2: 11989300- | Unknown | — |
| 11990550 | | |
| chr7: 23074700- | Unknown | — |
| 23076100 | | |
| chr22: 28479200- | Unknown | — |
| 28480250 | | |
| chr9: 36763800- | Unknown | — |
| 36766950 | | |
| chr6: 28757250- | Unknown | — |
| 28758600 | | |
| chr1: 50032150- | Unknown | — |
| 50033200 | | |
| chr6: 4334150- | Unknown | — |
| 4335300 | | |
| chr1: 195732150- | Unknown | — |
| 195733300 | | |
| chr6: 170483200- | Unknown | — |
| 170484200 | | |
| chr12: 38447100- | Unknown | — |
| 38448600 | | |
| chr7: 86667750- | Unknown | — |
| 86669950 | | |
| chr16: 9683650- | Unknown | — |
| 9684650 | | |
| chr1: 171342100- | Unknown | — |
| 171343300 | | |
| chr20: 47203350- | Unknown | — |
| 47204450 | | |
| chr20: 62030950- | Unknown | — |
| 62034000 | | |
| chr1: 168323150- | Unknown | — |
| 168325650 | | |
| chr6: 10133900- | Unknown | — |
| 10134950 | | |
| chr4: 71924850- | Unknown | — |
| 71926200 | | |
| chrX: 130711450- | Unknown | — |
| 130713600 | | |
| chr12: 38549550- | Unknown | — |
| 38551600 | | |
| chr2: 131094200- | Unknown | — |
| 131095000 | | |
| chr1: 183626800- | Unknown | — |
| 183628050 | | |
| chr6: 28918100- | Unknown | — |
| 28918850 | | |
| chr2: 198504700- | Unknown | — |
| 198507250 | | |
| chr11: 71350450- | Unknown | — |
| 71351500 | | |
| chr20: 47001000- | Unknown | — |
| 47003900 | | |
| chr21: 10600500- | Unknown | — |
| 10603150 | | |
| chr3: 34131250- | Unknown | — |
| 34132150 | | |
| chr5: 7170200- | Unknown | — |
| 7171750 | | |
| chr17: 50486700- | Unknown | — |
| 50487400 | | |
| chr2: 122809550- | Unknown | — |
| 122810150 | | |
| chr8: 57178000- | Unknown | — |
| 57179050 | | |
| chr4: 142803450- | Unknown | — |
| 142805000 | | |
| chr10: 118367950- | Unknown | — |
| 118370350 | | |
| chrX: 115004100- | Unknown | — |
| 115005700 | | |
| chr3: 53961050- | Unknown | — |
| 53963000 | | |
| chr6: 28920750- | Unknown | — |
| 28922800 | | |
| chr17: 11769750- | Unknown | — |
| 11770850 | | |
| chr6: 1594950- | Unknown | — |
| 1595600 | | |
| chr15: 79783300- | Unknown | — |
| 79784500 | | |
| chr7: 83684250- | Unknown | — |
| 83685650 | | |
| chr18: 2246500- | Unknown | — |
| 2247900 | | |
| chr10: 36147250- | Unknown | — |
| 36148500 | | |
| chr7: 91023500- | Unknown | — |
| 91025650 | | |
| chr2: 79337900- | Unknown | — |
| 79339650 | | |
| chrX: 115002950- | Unknown | — |
| 115003900 | | |
| chr1: 34557900- | Unknown | — |
| 34558600 | | |
| chr19: 523250- | Unknown | — |
| 524300 | | |
| chr13: 91315500- | Unknown | — |
| 91317200 | | |
| chr6: 26330700- | Unknown | — |
| 26333000 | | |
| chr9: 115565950- | Unknown | — |
| 115567400 | | |
| chr14: 42380150- | Unknown | — |
| 42381450 | | |
| chr7: 76356350- | Unknown | — |
| 76358750 | | |
| chr13: 108578200- | Unknown | — |
| 108579350 | | |
| chr8: 90569800- | Unknown | — |
| 90570900 | | |
| chr3: 185842600- | Unknown | — |
| 185844550 | | |
| chr1: 207903150- | Unknown | — |
| 207904800 | | |
| chr2: 14988000- | Unknown | — |
| 14988950 | | |
| chr12: 47819700- | Unknown | — |
| 47821500 | | |
| chr1: 83728350- | Unknown | — |
| 83730000 | | |
| chr11: 105384700- | Unknown | — |
| 105387850 | | |
| chr3: 88557900- | Unknown | — |
| 88558600 | | |
| chr6: 142290050- | Unknown | — |
| 142291600 | | |
| chr3: 83265600- | Unknown | — |
| 83268250 | | |

[0195] To experimentally test if inhibiting EZH2/PRC2 activity might modulate somatic promoter usage in GC, we treated IM95 GC cells with GSK126, a highly selective small-molecule inhibitor of EZH2 methyltransferase activity. This line was selected as it has previously shown to be sensitive to EZH2 depletion (FIG. 14). RNA-seq analysis of GSK126-treated IM95 cells at two treatment time points (Day 6 and 9) confirmed that genes upregulated upon EZH2 inhibition are enriched in previously identified PRC2 target gene sets (FIG. 18). GSK126 treatment caused deregulation of 2134 promoters in total. Of 1959 promoters exhibiting somatic alterations in primary GCs (FIG. 1D), GSK126 treatment caused deregulation of 251 somatic promoters in IM95 cells (12.8%). This proportion was significantly greater than the proportion of unaltered promoters exhibiting deregulation after GSK126 challenge (8.8%, OR 1.46 P<0.001, Fisher Test, FIG. 5B), suggesting heightened sensitivity of somatic promoters to EZH2 inhibition. The proportion of somatic promoters deregulated after EZH2 inhibition was also greater than the total proportion of genes (as defined by Gencode) regulated by GSK126 (1.5%, OR 9.21, P<0.001, FIG. 5B). Of those promoters exhibiting both GSK126 deregulation and also mapping to somatic promoters lost in primary GC, 89.6% were reactivated following GSK126 administration (78/87, FC>=2, qval <0.1, Methods and Materials), consistent with EZH2 functioning to repress these promoters. For example, FIGS. 5C and 5D highlights two lost somatic promoters (SLC9A9 and PSCA), exhibiting expression gain after GSK126 treatment (FIG. 5). These results thus suggest a general role for EZH2 in regulating epigenomic promoter alterations in GC.

[0196] Somatic Promoters Reveal Novel Cancer-Associated Transcripts

[0197] Finally, when analyzing the altered somatic promoters with respect to both proximity to known genes, we found that somatic promoters could be classified into annotated and unannotated categories. Annotated promoters were defined as promoters mapping close (<500 bp) to a known Gencode transcription start site (TSS), while unannotated promoters refer to those mapping to genomic regions devoid of known Gencode TSSs. The majority of promoters present in non-malignant tissues, and also promoters unchanged between tumors and normal tissues, mapped closely to previously annotated TSSs (72%-92%). In contrast, only 41% of promoters mapped to annotated promoter locations, while the remaining 59% mapped to “unannotated” locations, distant from Gencode TSSs and in many cases 2-10 kb away (FIG. 6a).

[0198] To test the functional relevance of these unannotated promoters, we used GenoCanyon, a nucleotide level quantification of genomic functional potential that integrates multiple levels of conservation and epigenomic information. We observed that 81% of the unannotated promoter regions exhibited a maximum genome wide functional score of greater than 0.9 (range 0-1), indicating high functional potential. To ascertain tissue type specificities, we then applied tissue specific annotations using GenoSkyline, an extension of the GenoCanyon framework integrating Roadmap Epigenomics data We observed that GI tissues had the 3^{rd} highest median score after ESC and fetal tissues, consistent with our tumors being gastric in lineage and also de-differentiated (FIG. 5b). In a separate analysis, recent studies have also suggested that endogenous repeat elements in the human genome may contribute significantly to regulatory element variation, and hypomethylation of repeat elements can induce cancer-associated transcription. We found that unannotated promoters, were also significantly enriched for the repeat elements ERV1 (P<0.0001 Unannotated vs. All) and L1 (P<0.0001 Unannotated vs. All, FIG. 13).

[0199] Compared to annotated promoters, unannotated promoters exhibited weaker H3K27ac signals suggesting that the former might have lower activity and decreased gene expression levels (FIG. 13). Supporting this, somatic promoters, even those supported by CAGE tags (indicating true promoters), exhibited significantly lower RNA-seq expression levels compared CAGE tag supported all promoters (FIG. 5c). We thus hypothesized that unannotated promoters might be associated with low transcript levels, thereby rendering them more challenging to detect by conventional depth transcriptome sequencing given the very wide dynamic range of cellular transcriptomes (10-10,000 transcripts per cell for different genes) (FIG. 5d). To test this possibility, we employed both down-sampling and up-sampling analysis. Not surprisingly, decreasing levels of RNA-seq depth caused a concomitant decrease in detected somatic promoter transcripts. For example, downsampling to −40M reads caused ˜250 transcripts (FPKM>0, FIG. 5e) to be rendered undetectable at somatic promoters. More convincingly, in the reciprocal experiment, we experimentally generated deep RNA-seq data for matched 5 GC/normal pairs (average read depth 140M compared to standard 100M), and confirmed the additional detection of 435 new somatic promoter-associated transcripts (FPKM>0) (FIG. 5e). We estimate that usage of deep RNA-sequencing data allowed us to discover additional transcripts for 22% of the unannotated promoters, not previously detectible at regular depth RNA-seq (FIG. 5f). These results demonstrate that despite being associated with bona-fide cancer associated transcripts, many somatic promoters defined by epigenomic profiling may have been missed by conventional-depth RNA-seq.

[0200] Discussion

[0201] Identifying somatically-altered cis-regulatory elements, and understanding how these elements direct cancer-associated gene expression represents a critical scientific goal. Here, we defined close to 2000 promoters exhibiting altered activity in GC, indicating that somatic promoters in GC are pervasive. Promoters are canonically defined as proximal cis-regulatory elements that recruit general transcription factors to initiate transcription. However, selection and activation of TSSs by RNA polymerase at core promoters is dependent on multiple factors. Core promoters are differentially distributed between genes of different functions, and chromatin distributions and epigenetic landscapes of core promoter regions can also differ in a tissue specific manner. Presence of multiple transcription initiation sites within the same gene can generate distinct transcript isoforms with different 5′UTRs that can act as switches to regulate gene expression, and usage of alternative 5′UTRs can also impact both translation and protein stability of cancer associated genes such as BRCA1, TGF-β and ERG Such findings demonstrate that specific promoter element activity is complex and cell context dependent, with impact on downstream transcriptional, translational, and functional processes.

[0202] A significant proportion (˜18%) of somatic promoters corresponded to alternative promoters. In cancer, alternative promoter utilization is of major relevance, as increasing numbers of genes (e.g. LEF1, TP53, TGFB3) are now being shown to exhibit distinct alternative-promoter associated isoforms that differentially affect malignant growth. In the current study, we identified alternative promoters in genes both known and novel to GC biology with significant clinical and translational implications. For example, we discovered an alternative promoter at the EpCAM gene locus specifically activated in gastric tumors. In GC, EpCAM encodes a transmembrane glycoprotein which has been proposed as a marker for circulating tumor cells and EpCAM expression levels have been correlated with GC patient prognosis. However, little is known about the specific cellular mechanisms driving high EpCAM expression in GC. Our finding that EpCAM is regulated in GC not through its canonical promoter, but instead through a cancer-specific alternative promoter may lend credence to recent reports suggesting that in addition to acting as an experimentally convenient surface marker, EpCAM may actually play a more direct pro-oncogenic role in stimulating cellular proliferation.

[0203] Another novel example of an alternative promoter-associated gene, identified for the first time in our study, was RASA3. While a functional role for RASA3 in cancer remains to definitely established, studies from other biological fields have shown that RASA3 can inhibit RAP1, which in turn has been implicated in invasion and metastasis in various cancers. RASA3 depletion can enhance signaling by integrins and mitogen-activated protein kinases, and the possibility that RASA3 can act as tumor suppressor has also been recently suggested through independent cross-species cancer studies. A plausible role for RASA3 as a potential tumor suppressor is consistent with our own results where expression of wild-type RASA3 potently inhibited cell migration and invasion in GC cell lines, while N-terminal variant RASA3 enhanced migration and invasion in normal gastric epithelial cells. A third example of an alternative-promoter driven genes was MET, which has been extensively investigated as a target for cancer therapy. While we and others have previously reported expression of an N-terminal truncated MET variant in cancer, functional implications of this truncated MET variant have remained unclear. In the present study, experimental assessment of MET wild-type and variant signaling revealed that truncated MET variants may have different downstream signaling effects compared to full-length MET isoforms. Under the experimental conditions used, we observed significant differences in phosphorylation patterns of ERK, STAT3 and GAB1, in a manner consistent with MET-Var being more pro-oncogenic compared to MET-Var, as both ERK, STAT3, and GAB1 have been shown to facilitate MET-induced signaling. The MET signaling pathway is known to be particularly complex with multiple feedback loops, and understanding how expression of the N terminal short MET isoform might modulate downstream survival signaling will be an important subject of future research, particularly in light of recent clinical trials targeting MET in lung cancer using antibodies which have been unsuccessful.

[0204] Our study also revealed an unexpected relationship between somatic promoters and tumor immunity. Specifically, we discovered that alternative promoter isoforms overexpressed in GC were significantly depleted of N-terminal peptides predicted to be potentially immunogenic, based on computational predictions of high-affinity MHC Class I binding and other immunological assays. We believe that finding is relevant to cancer immunity, as it builds on previous findings from the literature establishing the existence of self-reactive T-cells, the potential immunogenicity of overexpressed tumor antigens, and the process of tumor immunoediting. First, while the majority of self-reactive T-cells are clonally deleted during early development, numerous groups have also demonstrated the frequent persistence of self-reactive T cells in the periphery. For example, analysis of transgenic mice has shown that 25-40% of autoreactive T cells are likely to escape clonal deletion even in the presence of the deleting ligand, and in humans, Yu et al has demonstrated that clonal deletion prunes the T-cell repertoire but does not fully eliminate self-reactive T-cell clones. Importantly, while such self-reactive T-cells are typically low-avidity and are not capable of recognizing self-antigens under normal physiological conditions, they still retain the ability to become activated and to produce effector and memory cells under conditions of appropriate stimulation, such as infection and the mounting of anti-tumor responses.

[0205] Second, in cancer, several studies have shown that self-reactive T-cells can exhibit immunologic activity towards overexpressed tumor antigens, even if these antigens are also expressed at lower levels in normal tissues. One well-known example is the melanocyte differentiation antigen Melan-A/MART-1, which is expressed by both normal melanocytes and overexpressed in malignant melanoma cells. T-cell recognition of Melan-A/MART-1 has been detected in 50% of melanoma patients, and even healthy individuals have been shown to exhibit a disproportionately high frequency of Melan-A/MART-1-specific T cells in the peripheral blood. Besides Melan-A/MART-1, other examples of tumor associated self-antigens inducing immunological recognition in both healthy individuals and cancer patients include tyrosinase-related proteins (TRP-1 and TRP-2) and glycoprotein (gp) 100 in melanoma, and HA in mastocytoma cells. Such examples clearly demonstrate that in certain cases, normally expressed proteins can still become immunogenic when overexpressed in cancer. Third, tumor immunoediting—the acquired capacity of developing tumors to escape immune control, is a recognized hallmark of cancer. Tumor immune escape can occur via different mechanisms, such as through upregulation of immune checkpoint inhibitors (eg PD-L1), and altered transcription of antigen presenting genes or tumor-specific antigens. For example, decreased expression of melanoma antigens (eg gp100, MART-1, and HA) has been associated with melanoma progression to later disease stages. Besides overt downregulation of the entire gene, it is thus highly plausible that transcriptional changes affecting splice forms and promoter variants may also contribute to tumor immunoediting. For example, very recent work in B-cell acute lymphoblastic leukemia (B-ALL) has described the production of N-terminally truncated CD19 transcript variants in response to CD19 CART (chimeric antigen receptor-armed T cells) therapy, clearly showing that promoter transcript variants can indeed arise as a consequence of immunologic pressure. Taken collectively, we believe that these previously established findings all point to a plausible role for alternative promoters in reducing the immunogenic potential of tumors. In this regard, our observation that regions exhibiting somatic promoter alterations showed a significant overlap with binding targets of the Polycomb repressive complex 2 (PRC2) epigenetic regulator complex, and are particularly sensitive to EZH2 inhibition, suggests that pharmacologic approaches for reawakening somatic promoter-associated epitopes might represent an attractive strategy for increasing anti-tumor T-cell immunoreactivity and anti-tumor activity.

[0206] In conclusion, our study indicates an important role for somatic somatic promoters in GC. We also note that a significant portion (52%) of the somatic promoters localized to unannotated TSSs, consistent with recent studies indicating the existence of hundreds of transcript loci remaining to be annotated. Interestingly, a large portion of the human transcriptome has been shown to originate from repetitive elements that can exhibit promoter activity and/or express noncoding RNAs. Unannotated promoters activated in our GC study were found to be enriched in ERV-1 and L1 repeat elements which have been shown to be associated with stage specific transcription in early human embryonic cells, suggesting a yet unknown functional role for these promoters. Analysis of these unannotated promoters is likely to provide fertile ground for new and hitherto unanticipated insights into mechanisms of GC development and progression.

1. A method for determining the presence or absence of at least one promoter in a cancerous biological sample relative to a non-cancerous biological sample, comprising:
contacting the cancerous biological sample with at least one antibody specific for histone modifications H3K4me3 and H3K4me1;
isolating nucleic acid from the cancerous biological sample having a signal ratio of H3K4me3 relative to H3K4me1 greater than 1, wherein the isolated nucleic acid comprises at least one region specific to said histone modifications;
detecting a signal intensity of H3K4me3 in the isolated nucleic acid; and
determining the presence or absence of at least one promoter in the cancerous biological sample based on the change in the signal intensity of H3K4me3 relative to the signal intensity of H3K4me3 in a non-cancerous biological sample.

2. The method of claim 1, wherein the cancerous and non-cancerous biological sample comprises a single cell, multiple cells, fragments of cells, body fluid or tissue.

3. The method of any one of claims 1-2, wherein the cancerous and non-cancerous biological sample is obtained from the same subject.

4. The method of any one of claims 1-3, wherein the cancerous and non-cancerous biological sample are each obtained from different subjects.

5. The method of any one of claims 1-4, wherein the contacting step comprises the immunoprecipitation of chromatin with the antibodies specific for the histone modifications.

6. The method of any one of claims 1-5, further comprising mapping at least one promoter from the cancerous biological sample against at least one reference nucleic acid sequence to identify a gene transcript associated with the at least one promoter.

7. The method of claim 6, wherein the at least one reference nucleic acid sequence comprises a nucleic acid sequence derived from:
i) an annotated genome sequence;
ii) a de novo transcriptome assembly; and/or
a non-cancerous nucleic acid sequence library or database.

8. The method of claim 1, wherein the change of signal intensity of H3K4me3 is greater than a 1.5 fold increase or decrease relative to the signal intensity of H3K4me3 in the non-cancerous biological sample.

9. The method of claim 8, wherein a change of signal intensity of H3K4me3 greater than a 1.5 fold increase relative to the signal intensity of H3K4me3 in a non-cancerous biological sample, correlates to the presence of at least one cancer-associated promoter in the cancerous biological sample.

10. The method of claim 9, wherein the activity of the at least one cancer-associated promoter correlates with an increase of SUZ12 or EZH2 binding sites relative to the total promoter population.

11. The method of claim 10, wherein the increase of SUZ12 or EZH2 binding sites correlates with an upregulation of activity of the at least one cancer-associated promoter.

12. The method of claim 10, wherein the increase of SUZ12 or EZH2 binding sites correlates with a downregulation of activity of the at least one cancer-associated promoter.

13. The method of any one of claims 1-12, wherein the at least one promoter is a canonical promoter that is positioned within 500 bp from a known gene transcript start site.

14. The method of claim 13, wherein the gene transcript start site is associated with one or more of a cell-type specification gene, a cell adhesion gene, a cell mediated immunity gene, a gastric cancer-associated or deregulated gene, a PRC2 target gene or a transcription factor.

15. The method of claim 14, wherein the gene transcript start site is associated with an oncogene.

16. The method of claim 13, wherein the gene transcript start site is associated with a gene selected from the group consisting of MYC, MET, CEACAM6, CIDN7, CIDN3, HOTAIR, PVT1, HNF4α, RASA3, GRIN2D, EpCAM and a combination thereof.

17. The method of any of claims 1-16, wherein the cancer is gastric cancer or colon cancer.

18. The method of any of claims 1-17, wherein the at least one promoter is an alternative promoter that is associated with a canonical promoter, wherein the canonical promoter is present in both the cancerous biological sample and the non-cancerous biological sample, and wherein the alternative promoter is only present in the cancerous biological sample, or wherein the alternative promoter is only absent in the cancerous biological sample.

19. The method of any of claims 1-12, wherein the at least one promoter is an unannotated promoter that is positioned more than 500 bp away from a gene transcript start site.

20. The method of claim 18, further comprising:
measuring the expression level of the at least one alternative promoter in the cancerous biological sample and non-cancerous biological sample, wherein the measuring comprises digital profiling of reporter probes; and
determining the differential expression level of the at least one alternative promoter relative to the non-cancerous biological sample, based on the digital profiling of the reporter probes, to validate the presence or absence of at least one alternative promoter in the cancerous biological sample relative to a non-cancerous biological sample.

21. The method of claim 20, wherein said step of measuring is conducted using a NanoString™ platform.

22. A method for determining the prognosis of cancer in a subject, comprising,
contacting a cancerous biological sample obtained from the subject with at least one antibody specific for histone modification H3K4me3 and H3K4me1;
isolating nucleic acid from the cancerous biological sample having a signal ratio of H3K4me3 relative to H3K4me1 greater than 1, wherein the isolated nucleic acid comprises at least one region specific to said histone modifications;
detecting a signal intensity of H3K4me3 in the isolated nucleic acid; and
determining the presence or absence of at least one cancer-associated promoter in the cancerous biological sample based on the change in the signal intensity of H3K4me3 relative to the signal intensity of H3K4me3 in a reference nucleic acid sequence, wherein the presence or absence of the at least one cancer-associated promoter in the cancerous biological sample is indicative of the prognosis of the cancer in the subject.

23. The method of claim 22, wherein the at least one cancer-associated promoter is an alternative promoter that is associated with a canonical promoter, wherein the canonical promoter is present in both the cancerous biological sample and the reference nucleic acid sequence, and wherein the alternative promoter is only present in the cancerous biological sample or wherein the alternative promoter is only absent in the cancerous biological sample.

24. The method of claim 23, wherein the presence or absence of the at least one alternative promoter in the cancerous sample is indicative of a poor prognosis of cancer survival in the subject.

25. The method of claim 23, further comprising:
measuring the expression level of the at least one alternative promoter in the cancerous biological sample and the reference nucleic acid sequence, wherein the measuring comprises digital profiling of reporter probes; and
determining the differential expression level of the at least one alternative promoter relative to the non-cancerous biological sample, based on the digital profiling of the reporter probes, to validate the presence or absence of at least one alternative promoter in the cancerous biological sample relative to the reference nucleic acid sequence.

26. The method of claim 25, wherein said step of measuring is conducted using a NanoString™ platform.

27. A biomarker for detecting cancer in a subject, the biomarker comprising at least one promoter having a change in signal intensity of H3K4me3 in a cancerous biological sample relative to a non-cancerous biological sample.

28. The biomarker of claim 27, wherein the at least one promoter comprises an increase of EZH2 binding sites relative to the total promoter population.

29. The biomarker of claim 27, wherein the at least one promoter is hypomethylated.

30. The biomarker of claim 27, wherein the at least one promoter is hypermethylated.

31. The biomarker of claim 27, wherein the at least one promoter is a canonical promoter that is positioned less than 500 bp away from a gene transcript start site.

32. The biomarker of claim 31, wherein the gene transcript start site is associated with one or more of a cell-type specification gene, a cell adhesion gene, a cell mediated immunity gene, a gastric cancer-associated or deregulated gene, a PRC2 target gene or a transcription factor.

33. The biomarker of claim 31, wherein the gene transcript start site is associated with an oncogene.

34. The biomarker of claim 31, wherein the gene transcript start site is associated with a gene selected from the group consisting of MYC, MET, CEACAM6, CIDN7, CIDN3, HOTAIR, PVT1, HNF4α, RASA3, GRIN2D, EpCAM and a combination thereof.

35. The biomarker of claim 27, wherein the at least one promoter is an alternative promoter that is associated with a canonical promoter, wherein the canonical promoter is present in both a cancerous sample and a non-cancerous sample, and wherein the alternative promoter is only present in a cancerous sample, or wherein the alternative promoter is only absent in a cancerous sample.

36. The biomarker of claim 27, wherein the at least one promoter is an unannotated promoter that is positioned more than 500 bp away from a gene transcript start site.

37. A method for modulating the activity of at least one cancer-associated promoter in a cell, comprising administering an inhibitor of EZH2 to the cell.

38. A method for modulating the immune response of a subject to cancer, comprising administering to the subject an inhibitor of EZH2, wherein the EZH2 is associated with at least one cancer-associated promoter in the subject.

39. The method of claim 38, wherein the inhibitor of EZH2 modulates the expression of immunogenic N-terminal peptides.

40. The method of claim 38 or 39, wherein the at least one cancer-associated promoter is an alternative promoter that is associated with a canonical promoter, wherein the canonical promoter is present in both a cancerous sample and a non-cancerous sample, and wherein the alternative promoter is only present in a cancerous sample, or wherein the alternative promoter is only absent in a cancerous sample.

41. The method of claim 40, wherein the alternative promoter is associated with a transcript variant, and wherein the transcript variant encodes a N-terminal protein variant.

42. The method of claim 41, wherein the N-terminal protein variant is an N-terminal truncated protein or an N-terminal elongated protein.

43. The method of any one of claims 38 to 42, wherein the inhibitor of EZH2 is a siRNA or a small molecule.

44. The method of any one of claims 38 to 43, wherein the inhibitor of EZH2 is GSK126.

45. A method for determining the presence or absence of at least one cancer-associated promoter in a cancerous biological sample relative to a non-cancerous biological sample, comprising:
contacting the cancerous biological sample with at least one antibody specific for histone modifications H3K4me3 and H3K4me1;
isolating nucleic acid from the cancerous biological sample having a signal ratio of H3K4me3 relative to H3K4me1 greater than 1, wherein the isolated nucleic acid comprises at least one region specific to said histone modifications;
detecting a signal intensity of H3K4me3 in the isolated nucleic acid at a read depth of 20M; and
determining the presence or absence of at least one cancer-associated promoter in the cancerous biological sample based on the change in the signal intensity of H3K4me3 relative to the signal intensity of H3K4me3 in a non-cancerous biological sample.

46. An inhibitor of EZH2 for use in modulating the activity of at least one cancer-associated promoter in a cell.

47. Use of an inhibitor of EZH2 in the manufacture of a medicament for modulating the activity of at least one cancer-associated promoter in a cell.

48. An inhibitor of EZH2 for use in modulating the immune response of a subject to cancer, wherein the EZH2 is associated with at least one cancer-associated promoter in the subject.

49. Use of an inhibitor of EZH2 in the manufacture of a medicament for modulating the immune response of a subject to cancer, wherein the EZH2 is associated with at least one cancer-associated promoter in the subject.

The application's sequence listing, which the Patent Office published only in electronic form, follows.

SEQUENCE LISTING (2068 sequences)

SEQ ID NO: 1 - protein, 22 aa, Homo sapiens
IDNSQVESGSLEDDWDFLPPKK

SEQ ID NO: 2 - protein, 14 aa, Homo sapiens
FYALSASFEPFSNK

SEQ ID NO: 3 - protein, 12 aa, Homo sapiens
EQFLDGDGWTSR

SEQ ID NO: 4 - protein, 15 aa, Homo sapiens
IKDPDASKPEDWDER

SEQ ID NO: 5 - protein, 14 aa, Homo sapiens
GDVTAQIALQPALK

SEQ ID NO: 6 - protein, 13 aa, Homo sapiens
GISLNPEQWSQLK

SEQ ID NO: 7 - protein, 17 aa, Homo sapiens
AYHSFLVEPISCHAWNK

SEQ ID NO: 8 - protein, 13 aa, Homo sapiens
IAVQPGTVGPQGR

SEQ ID NO: 9 - protein, 16 aa, Homo sapiens
VLAQNSGFDLQETLVK

SEQ ID NO: 10 - protein, 23 aa, Homo sapiens
CKDDEFTHLYTLIVRPDNTYEVK

SEQ ID NO: 11 - protein, 26 aa, Homo sapiens
AKIDDPTDSKPEDWDKPEHIPDPDAK

SEQ ID NO: 12 - protein, 8 aa, Homo sapiens
VHVIFNYK

SEQ ID NO: 13 - protein, 13 aa, Homo sapiens
HEQNIDCGGGYVK

SEQ ID NO: 14 - protein, 8 aa, Homo sapiens
LIDFGLAR

SEQ ID NO: 15 - protein, 10 aa, Homo sapiens
TWKPTLVILR

SEQ ID NO: 16 - protein, 14 aa, Homo sapiens
AIWNVINWENVTER

SEQ ID NO: 17 - protein, 24 aa, Homo sapiens
IDDPTDSKPEDWDKPEHIPDPDAK

SEQ ID NO: 18 - protein, 8 aa, Homo sapiens
NVRPDYLK

SEQ ID NO: 19 - protein, 13 aa, Homo sapiens
NSVSQISVLSGGK

SEQ ID NO: 20 - protein, 21 aa, Homo sapiens
DGNVLLHEMQIQHPTASLIAK

SEQ ID NO: 21 - protein, 8 aa, Homo sapiens
AGATHVER

SEQ ID NO: 22 - protein, 10 aa, Homo sapiens
LVALLNTLDR

SEQ ID NO: 23 - protein, 15 aa, Homo sapiens
HHAAYVNNLNVTEEK

SEQ ID NO: 24 - protein, 18 aa, Homo sapiens
FYGDEEKDKGLQTSQDAR

SEQ ID NO: 25 - protein, 9 aa, Homo sapiens
KVHVIFNYK

SEQ ID NO: 26 - protein, 13 aa, Homo sapiens
GPLPAAPPVAPER

SEQ ID NO: 27 - protein, 8 aa, Homo sapiens
VLLSALER

SEQ ID NO: 28 - protein, 10 aa, Homo sapiens
SVSIGYLLVK

SEQ ID NO: 29 - protein, 15 aa, Homo sapiens
IQQEIAVQNPLVSER

SEQ ID NO: 30 - protein, 9 aa, Homo sapiens
GELLEAIKR

SEQ ID NO: 31 - protein, 15 aa, Homo sapiens
AHNQDLGLAGSCLAR

SEQ ID NO: 32 - protein, 16 aa, Homo sapiens
YVVVTGITPTPLGEGK

SEQ ID NO: 33 - protein, 24 aa, Homo sapiens
MEDLDQSPLVSSSDSPPRPQPAFK

SEQ ID NO: 34 - protein, 15 aa, Homo sapiens
AAQAPSSFQLLYDLK

SEQ ID NO: 35 - protein, 15 aa, Homo sapiens
LQAQLNELQAQLSQK

SEQ ID NO: 36 - protein, 9 aa, Homo sapiens
ALQFLEEVK

SEQ ID NO: 37 - protein, 9 aa, Homo sapiens
LLTSGYLQR

SEQ ID NO: 38 - protein, 13 aa, Homo sapiens
GDLNDCFIPCTPK

SEQ ID NO: 39 - protein, 18 aa, Homo sapiens
ASSEGGTAAGAGLDSLHK

SEQ ID NO: 40 - protein, 15 aa, Homo sapiens
EAVTEILGIEPDREK

SEQ ID NO: 41 - protein, 14 aa, Homo sapiens
EVEERPAPTPWGSK

SEQ ID NO: 42 - protein, 10 aa, Homo sapiens
IITEGFEAAK

SEQ ID NO: 43 - protein, 13 aa, Homo sapiens
YLNIFGESQPNPK

SEQ ID NO: 44 - protein, 20 aa, Homo sapiens
LTAASVGVQGSGWGWLGFNK

SEQ ID NO: 45 - protein, 18 aa, Homo sapiens
IAPLEEGTLPFNLAEAQR

SEQ ID NO: 46 - protein, 11 aa, Homo sapiens
GQTLVVQFTVK

SEQ ID NO: 47 - protein, 17 aa, Homo sapiens
AQLGVQAFADALLIIPK

SEQ ID NO: 48 - protein, 9 aa, Homo sapiens
QVAPEKPVK

SEQ ID NO: 49 - protein, 25 aa, Homo sapiens
VATAQDDITGDGTTSNVLIIGELLK

SEQ ID NO: 50 - protein, 13 aa, Homo sapiens
GLLPQLLGVAPEK

SEQ ID NO: 51 - protein, 8 aa, Homo sapiens
NAYVWTLK

SEQ ID NO: 52 - protein, 16 aa, Homo sapiens
IYGADDIELLPEAQHK

SEQ ID NO: 53 - protein, 13 aa, Homo sapiens
CHAIIDEQPLIFK

SEQ ID NO: 54 - protein, 14 aa, Homo sapiens
KGISLNPEQWSQLK

SEQ ID NO: 55 - protein, 12 aa, Homo sapiens
GIDPFSLDALSK

SEQ ID NO: 56 - protein, 14 aa, Homo sapiens
LLQCYPPPEDAAVK

SEQ ID NO: 57 - protein, 11 aa, Homo sapiens
GVPTGFILPIR

SEQ ID NO: 58 - protein, 8 aa, Homo sapiens
IVTCGTDR

SEQ ID NO: 59 - protein, 11 aa, Homo sapiens
TPVPSDIDISR

SEQ ID NO: 60 - protein, 7 aa, Homo sapiens
YQEALAK

SEQ ID NO: 61 - protein, 18 aa, Homo sapiens
VAWVSHDSTVCLADADKK

SEQ ID NO: 62 - protein, 12 aa, Homo sapiens
LDIDPETITWQR

SEQ ID NO: 63 - protein, 21 aa, Homo sapiens
IDNSQVESGSLEDDWDFLPPK

SEQ ID NO: 64 - protein, 9 aa, Homo sapiens
LAILQVGNR

SEQ ID NO: 65 - protein, 13 aa, Homo sapiens
AQAALAVNISAAR

SEQ ID NO: 66 - protein, 11 aa, Homo sapiens
GALALAQAVQR

SEQ ID NO: 67 - protein, 13 aa, Homo sapiens
TDPTTLTDEEINR

SEQ ID NO: 68 - protein, 8 aa, Homo sapiens
LELSVLYK

SEQ ID NO: 69 - protein, 12 aa, Homo sapiens
GLDGYQGPDGPR

SEQ ID NO: 70 - protein, 14 aa, Homo sapiens
LSGLEQPQGALQTR

SEQ ID NO: 71 - protein, 15 aa, Homo sapiens
SCQTALVEILDVIVR

SEQ ID NO: 72 - protein, 9 aa, Homo sapiens
DDNMFQIGK

SEQ ID NO: 73 - protein, 17 aa, Homo sapiens
EHNGQVTGIDWAPESNR

SEQ ID NO: 74 - protein, 16 aa, Homo sapiens
KIKDPDASKPEDWDER

SEQ ID NO: 75 - protein, 14 aa, Homo sapiens
MFGIPVVVAVNAFK

SEQ ID NO: 76 - protein, 10 aa, Homo sapiens
FFEHFIEGGR

SEQ ID NO: 77 - protein, 10 aa, Homo sapiens
IFHELTQTDK

SEQ ID NO: 78 - protein, 9 aa, Homo sapiens
FINLFPETK

SEQ ID NO: 79 - protein, 9 aa, Homo sapiens
FYGDEEKDK

SEQ ID NO: 80 - protein, 25 aa, Homo sapiens
FNGGGHINHSIFWTNLSPNGGGEPK

SEQ ID NO: 81 - protein, 13 aa, Homo sapiens
DPDASKPEDWDER

SEQ ID NO: 82 - protein, 22 aa, Homo sapiens
LGSPDYGNSALLSLPGYRPTTR

SEQ ID NO: 83 - protein, 19 aa, Homo sapiens
ASGDSARPVLLQVAESAYR

SEQ ID NO: 84 - protein, 12 aa, Homo sapiens
TDTESELDLISR

SEQ ID NO: 85 - protein, 10 aa, Homo sapiens
LDFVCSFLQK

SEQ ID NO: 86 - protein, 13 aa, Homo sapiens
WIDETPPVDQPSR

SEQ ID NO: 87 - protein, 19 aa, Homo sapiens
GLLGALTSTPYSPTQHLER

SEQ ID NO: 88 - protein, 24 aa, Homo sapiens
KPEDWDEEMDGEWEPPVIQNPEYK

SEQ ID NO: 89 - protein, 7 aa, Homo sapiens
FSDIQIR

SEQ ID NO: 90 - protein, 16 aa, Homo sapiens
STSFNVQDLLPDHEYK

SEQ ID NO: 91 - protein, 18 aa, Homo sapiens
GEQGFMGNTGPTGAVGDR

SEQ ID NO: 92 - protein, 11 aa, Homo sapiens
QPSQGPTFGIK

SEQ ID NO: 93 - protein, 12 aa, Homo sapiens
THLSLSHNPEQK

SEQ ID NO: 94 - protein, 23 aa, Homo sapiens
APVPSTCSSTFPEELSPPSHQAK

SEQ ID NO: 95 - protein, 18 aa, Homo sapiens
GEGGTTNPHIFPEGSEPK

SEQ ID NO: 96 - protein, 17 aa, Homo sapiens
TALAEAELEYNPEHVSR

SEQ ID NO: 97 - protein, 9 aa, Homo sapiens
FPLLKPSPK

SEQ ID NO: 98 - protein, 10 aa, Homo sapiens
DQAANLMANR

SEQ ID NO: 99 - protein, 7 aa, Homo sapiens
HLTAQVR

SEQ ID NO: 100 - protein, 7 aa, Homo sapiens
FVLSSGK

SEQ ID NO: 101 - protein, 16 aa, Homo sapiens
SSLPPVLGTESDATVK

SEQ ID NO: 102 - protein, 11 aa, Homo sapiens
AWGAVVPLVGK

SEQ ID NO: 103 - protein, 13 aa, Homo sapiens
IEGYPDPEVVWFK

SEQ ID NO: 104 - protein, 8 aa, Homo sapiens
GKNVLINK

SEQ ID NO: 105 - protein, 9 aa, Homo sapiens
GLQTSQDAR

SEQ ID NO: 106 - protein, 7 aa, Homo sapiens
HTLTQIK

SEQ ID NO: 107 - protein, 21 aa, Homo sapiens
VHAELADVLTEAVVDSILAIK

SEQ ID NO: 108 - protein, 23 aa, Homo sapiens
YVIHTVGPIAYGEPSASQAAELR

SEQ ID NO: 109 - protein, 14 aa, Homo sapiens
IQSSHNFQLESVNK

SEQ ID NO: 110 - protein, 8 aa, Homo sapiens
QIDNPDYK

SEQ ID NO: 111 - protein, 13 aa, Homo sapiens
DAEGILEDLQSYR

SEQ ID NO: 112 - protein, 12 aa, Homo sapiens
YTAESSDTLCPR

SEQ ID NO: 113 - protein, 19 aa, Homo sapiens
EESREPAPASPAPAGVEIR

SEQ ID NO: 114 - protein, 12 aa, Homo sapiens
EMDRETLIDVAR

SEQ ID NO: 115 - protein, 15 aa, Homo sapiens
NEVSFVIHNLPVLAK

SEQ ID NO: 116 - protein, 10 aa, Homo sapiens
QVAPEKPVKK

SEQ ID NO: 117 - protein, 11 aa, Homo sapiens
FLINLEGGDIR

SEQ ID NO: 118 - protein, 13 aa, Homo sapiens
LSVNSVTAGDYSR

SEQ ID NO: 119 - protein, 25 aa, Homo sapiens
QAQVNLTVVDKPDPPAGTPCASDIR

SEQ ID NO: 120 - protein, 15 aa, Homo sapiens
IFDDVSSGVSQLASK

SEQ ID NO: 121 - protein, 12 aa, Homo sapiens
PDASKPEDWDER

SEQ ID NO: 122 - protein, 11 aa, Homo sapiens
YGGAPQALTLK

SEQ ID NO: 123 - protein, 17 aa, Homo sapiens
LVTPGETPSWTGSGFVR

SEQ ID NO: 124 - protein, 11 aa, Homo sapiens
EQISDIDDAVR

SEQ ID NO: 125 - protein, 34 aa, Homo sapiens
KPAAGLSAAPVPTAPAAGAPLMDFGNDFVPPAPR

SEQ ID NO: 126 - protein, 10 aa, Homo sapiens
ATSSTQSLAR

SEQ ID NO: 127 - protein, 14 aa, Homo sapiens
LLVPTQFVGAIIGK

SEQ ID NO: 128 - protein, 8 aa, Homo sapiens
GELLEAIK

SEQ ID NO: 129 - protein, 15 aa, Homo sapiens
FFQPTEMAAQDFFQR

SEQ ID NO: 130 - protein, 14 aa, Homo sapiens
GSGSRPGIEGDTPR

SEQ ID NO: 131 - protein, 25 aa, Homo sapiens
NAIDDGCVVPGAGAVEVAMAEALIK

SEQ ID NO: 132 - protein, 35 aa, Homo sapiens
AAAAAAVGPGAGGAGSAVPGGAGPCATVSVFPGAR

SEQ ID NO: 133 - protein, 11 aa, Homo sapiens
DFLTPPLLSVR

SEQ ID NO: 134 - protein, 12 aa, Homo sapiens
LFVVPADEAQAR

SEQ ID NO: 135 - protein, 11 aa, Homo sapiens
WMIQYNNLNLK

SEQ ID NO: 136 - protein, 13 aa, Homo sapiens
SLPISLVFLVPVR

SEQ ID NO: 137 - protein, 9 aa, Homo sapiens
ALQVGCLLR

SEQ ID NO: 138 - protein, 12 aa, Homo sapiens
ESFNPESYELDK

SEQ ID NO: 139 - protein, 11 aa, Homo sapiens
TGWISTSSIWK

SEQ ID NO: 140 - protein, 12 aa, Homo sapiens
EYAEDDNIYQQK

SEQ ID NO: 141 - protein, 17 aa, Homo sapiens
TQIAICPNNHEVHIYEK

SEQ ID NO: 142 - protein, 14 aa, Homo sapiens
SLEAQVAHADQQLR

SEQ ID NO: 143 - protein, 7 aa, Homo sapiens
SVTLLIK

SEQ ID NO: 144 - protein, 17 aa, Homo sapiens
IHFVPGWDCHGLPIEIK

SEQ ID NO: 145 - protein, 12 aa, Homo sapiens
QQPDTELEIQQK

SEQ ID NO: 146 - protein, 21 aa, Homo sapiens
KGEPVSAEDLGVSGALTVLMK

SEQ ID NO: 147 - protein, 13 aa, Homo sapiens
LGIGMDTCVIPLR

SEQ ID NO: 148 - protein, 28 aa, Homo sapiens
QPSWDPSPVSSTVPAPSPLSAAAVSPSK

SEQ ID NO: 149 - protein, 11 aa, Homo sapiens
QISEGVEYIHK

SEQ ID NO: 150 - protein, 16 aa, Homo sapiens
SEGGTAAGAGLDSLHK

SEQ ID NO: 151 - protein, 9 aa, Homo sapiens
PTGFILPIR

SEQ ID NO: 152 - protein, 13 aa, Homo sapiens
SQAGVSSGAPPGR

SEQ ID NO: 153 - protein, 15 aa, Homo sapiens
VCGDSDKGFVVINQK

SEQ ID NO: 154 - protein, 11 aa, Homo sapiens
LGIVQGIVGAR

SEQ ID NO: 155 - protein, 8 aa, Homo sapiens
FLSLPEVR

SEQ ID NO: 156 - protein, 9 aa, Homo sapiens
GLVLDHGAR

SEQ ID NO: 157 - protein, 9 aa, Homo sapiens
LKNQVTQLK

SEQ ID NO: 158 - protein, 27 aa, Homo sapiens
TSVQFQNFSPTVVHPGDLQTQLAVQTK

SEQ ID NO: 159 - protein, 10 aa, Homo sapiens
EPPYGADVLR

SEQ ID NO: 160 - protein, 11 aa, Homo sapiens
AAGPLLTDECR

SEQ ID NO: 161 - protein, 21 aa, Homo sapiens
IIEVAPQVATQNVNPTPGATS

SEQ ID NO: 162 - protein, 11 aa, Homo sapiens
LFSQGQDVSNK

SEQ ID NO: 163 - protein, 15 aa, Homo sapiens
VSGPWEEADAEAVAR

SEQ ID NO: 164 - protein, 13 aa, Homo sapiens
VTGTQPITCTWMK

SEQ ID NO: 165 - protein, 6 aa, Homo sapiens
VLIDIR

SEQ ID NO: 166 - protein, 12 aa, Homo sapiens
AVLEEGTDVVIK

SEQ ID NO: 167 - protein, 11 aa, Homo sapiens
QFAEILHFTLR

SEQ ID NO: 168 - protein, 23 aa, Homo sapiens
IVGAPMHDLLLWNNATVTTCHSK

SEQ ID NO: 169 - protein, 12 aa, Homo sapiens
AYIQENLELVEK

SEQ ID NO: 170 - protein, 16 aa, Homo sapiens
EIGLLSEEVELYGETK

SEQ ID NO: 171 - protein, 10 aa, Homo sapiens
DSFLGSIPGK

SEQ ID NO: 172 - protein, 10 aa, Homo sapiens
QLDALLEALK

SEQ ID NO: 173 - protein, 11 aa, Homo sapiens
IIDEDFELTER

SEQ ID NO: 174 - protein, 9 aa, Homo sapiens
DTINLLDQR

SEQ ID NO: 175 - protein, 10 aa, Homo sapiens
VVQSLEQTAR

SEQ ID NO: 176 - protein, 10 aa, Homo sapiens
DDSNLYINVK

SEQ ID NO: 177 - protein, 14 aa, Homo sapiens
VSGQPQSVTASSDK

SEQ ID NO: 178 - protein, 12 aa, Homo sapiens
EFCQQEVEPMCK

SEQ ID NO: 179 - protein, 20 aa, Homo sapiens
AGNSLAASTAEETAGSAQGR

SEQ ID NO: 180 - protein, 14 aa, Homo sapiens
EYWMDPEGEMKPGR

SEQ ID NO: 181 - protein, 10 aa, Homo sapiens
LQSQLLSIEK

SEQ ID NO: 182 - protein, 10 aa, Homo sapiens
AGESVELFGK

SEQ ID NO: 183 - protein, 14 aa, Homo sapiens
NGEFFMSPNDFVTR

SEQ ID NO: 184 - protein, 15 aa, Homo sapiens
VVVGAPQEIVAANQR

SEQ ID NO: 185 - protein, 22 aa, Homo sapiens
SQAPLESSLDSLGDVFLDSGRK

SEQ ID NO: 186 - protein, 7 aa, Homo sapiens
GCLELIK

SEQ ID NO: 187 - protein, 16 aa, Homo sapiens
HSQTDQEPMCPVGMNK

SEQ ID NO: 188 - protein, 9 aa, Homo sapiens
NPQVCGPGR

SEQ ID NO: 189 - protein, 16 aa, Homo sapiens
SRGPGAPCQDVDECAR

SEQ ID NO: 190 - protein, 17 aa, Homo sapiens
TKDEYLINSQTTEHIVK

SEQ ID NO: 191 - protein, 19 aa, Homo sapiens
IATTTASAATAAAIGATPR

SEQ ID NO: 192 - protein, 11 aa, Homo sapiens
LGHELQQAGLK

SEQ ID NO: 193 - protein, 12 aa, Homo sapiens
TEVPPLLLILDR

SEQ ID NO: 194 - protein, 8 aa, Homo sapiens
YGDEEKDK

SEQ ID NO: 195 - protein, 11 aa, Homo sapiens
SESQGTAPAFK

SEQ ID NO: 196 - protein, 19 aa, Homo sapiens
LPQEPGREQVVEDRPVGGR

SEQ ID NO: 197 - protein, 20 aa, Homo sapiens
LPYGGQCRPCPCPEGPGSQR

SEQ ID NO: 198 - protein, 15 aa, Homo sapiens
VYLLYRPGHYDILYK

SEQ ID NO: 199 - protein, 9 aa, Homo sapiens
FQVATDALK

SEQ ID NO: 200 - protein, 16 aa, Homo sapiens
LQEGQTLEFLVASVPK

SEQ ID NO: 201 - protein, 16 aa, Homo sapiens
LQGAVCGVSSGPPPPR

SEQ ID NO: 202 - protein, 12 aa, Homo sapiens
IQNVVTSFAPQR

SEQ ID NO: 203 - protein, 8 aa, Homo sapiens
VSTLQNQR

SEQ ID NO: 204 - protein, 19 aa, Homo sapiens
LSQLEEHLSQLQDNPPQEK

SEQ ID NO: 205 - protein, 21 aa, Homo sapiens
SQAPLESSLDSLGDVFLDSGR

SEQ ID NO: 206 - protein, 15 aa, Homo sapiens
AGPDLASCLDVDECR

SEQ ID NO: 207 - protein, 9 aa, Homo sapiens
GTCHYYANK

SEQ ID NO: 208 - protein, 11 aa, Homo sapiens
HKSETDTSLIR

SEQ ID NO: 209 - protein, 12 aa, Homo sapiens
KQQNQELQEQLR

SEQ ID NO: 210 - protein, 11 aa, Homo sapiens
SGDLYVLAADK

SEQ ID NO: 211 - protein, 15 aa, Homo sapiens
AFGFSHLEALLDDSK

SEQ ID NO: 212 - protein, 20 aa, Homo sapiens
EILTLLQGVHQGAGFQDIPK

SEQ ID NO: 213 - protein, 20 aa, Homo sapiens
IQQCPGTETAEYQSLCPHGR

SEQ ID NO: 214 - protein, 14 aa, Homo sapiens
KDPDASKPEDWDER

SEQ ID NO: 215 - protein, 26 aa, Homo sapiens
SYWLSTTAPLPMMPVAEDEIKPYISR

SEQ ID NO: 216 - protein, 8 aa, Homo sapiens
VPQDVLQK

SEQ ID NO: 217 - protein, 9 aa, Homo sapiens
DFGSFDKFK

SEQ ID NO: 218 - protein, 17 aa, Homo sapiens
FIILSQEGSLCSVSIEK

SEQ ID NO: 219 - protein, 12 aa, Homo sapiens
LAVATFAGIENK

SEQ ID NO: 220 - protein, 9 aa, Homo sapiens
RLENAGSLK

SEQ ID NO: 221 - protein, 15 aa, Homo sapiens
AAMPPQIIQFPEDQK

SEQ ID NO: 222 - protein, 11 aa, Homo sapiens
EAQNLSAMEIR

SEQ ID NO: 223 - protein, 12 aa, Homo sapiens
ILVAGDSMDSVK

SEQ ID NO: 224 - protein, 10 aa, Homo sapiens
LVHSYPYDWR

SEQ ID NO: 225 - protein, 15 aa, Homo sapiens
AEAGDAALSVAEWLR

SEQ ID NO: 226 - protein, 11 aa, Homo sapiens
ELSNFYFSIIK

SEQ ID NO: 227 - protein, 16 aa, Homo sapiens
AEAAAPYTVLAQSAPR

SEQ ID NO: 228 - protein, 14 aa, Homo sapiens
GPGAPCQDVDECAR

SEQ ID NO: 229 - protein, 10 aa, Homo sapiens
VSDFYDIEER

SEQ ID NO: 230 - protein, 14 aa, Homo sapiens
NNDFYVTGESYAGK

SEQ ID NO: 231 - protein, 10 aa, Homo sapiens
QPVVDTFDIR

SEQ ID NO: 232 - protein, 12 aa, Homo sapiens
QQLQALSEPQPR

SEQ ID NO: 233 - protein, 16 aa, Homo sapiens
APAEILNGKEISAQIR

SEQ ID NO: 234 - protein, 18 aa, Homo sapiens
KLDVEEPDSANSSFYSTR

SEQ ID NO: 235 - protein, 21 aa, Homo sapiens
QPPPDSSEEAPPATQNFIIPK

SEQ ID NO: 236 - protein, 11 aa, Homo sapiens
SLADVDAILAR

SEQ ID NO: 237 - protein, 26 aa, Homo sapiens
TGGSAQPETPYSGPGLLIDSLVLLPR

SEQ ID NO: 238 - protein, 15 aa, Homo sapiens
CDLCQEVLADIGFVK

SEQ ID NO: 239 - protein, 10 aa, Homo sapiens
FIAGTGCLVR

SEQ ID NO: 240 - protein, 22 aa, Homo sapiens
HHAAYVNNLNVTEEKYQEALAK

SEQ ID NO: 241 - protein, 18 aa, Homo sapiens
QGIVHLDLKPENIMCVNK

SEQ ID NO: 242 - protein, 13 aa, Homo sapiens
TLGDQLSLLLGAR

SEQ ID NO: 243 - protein, 9 aa, Homo sapiens
CTHWAEGGK

SEQ ID NO: 244 - protein, 16 aa, Homo sapiens
FGLYLPLFKPSVSTSK

SEQ ID NO: 245 - protein, 14 aa, Homo sapiens
GSCYPATGDLLVGR

SEQ ID NO: 246 - protein, 10 aa, Homo sapiens
VMPLIIQGFK

SEQ ID NO: 247 - protein, 14 aa, Homo sapiens
TPLWIGLAGEEGSR

SEQ ID NO: 248 - protein, 19 aa, Homo sapiens
TQPDGTSVPGEPASPISQR

SEQ ID NO: 249 - protein, 12 aa, Homo sapiens
VWGVPIPVFHHK

SEQ ID NO: 250 - protein, 10 aa, Homo sapiens
ALLNVVDNAR

SEQ ID NO: 251 - protein, 16 aa, Homo sapiens
GGTTNPHIFPEGSEPK

SEQ ID NO: 252 - protein, 9 aa, Homo sapiens
YTVNFLEAK

SEQ ID NO: 253 - protein, 8 aa, Homo sapiens
ATIQGVLR

SEQ ID NO: 254 - protein, 11 aa, Homo sapiens
GPLGDQYQTVK

SEQ ID NO: 255 - protein, 21 aa, Homo sapiens
VAAQVDGGAQVQQVLNIECLR

SEQ ID NO: 256 - protein, 9 aa, Homo sapiens
FTPVVCGLR

SEQ ID NO: 257 - protein, 31 aa, Homo sapiens
LFPNSLDQTDMHGDSEYNIMFGPDICGPGTK

SEQ ID NO: 258 - protein, 20 aa, Homo sapiens
TILLSTTDPADFAVAEALEK

SEQ ID NO: 259 - protein, 13 aa, Homo sapiens
LTYLGCASVNAPR

SEQ ID NO: 260 - protein, 14 aa, Homo sapiens
SCYLSSLDLLLEHR

SEQ ID NO: 261 - protein, 13 aa, Homo sapiens
VVATTQMQAADAR

SEQ ID NO: 262 - protein, 27 aa, Homo sapiens
GVGGSQPPDIDKTELVEPTEYLVVHLK

SEQ ID NO: 263 - protein, 11 aa, Homo sapiens
KEIHTVPDMGK

SEQ ID NO: 264 - protein, 10 aa, Homo sapiens
LFTALFPFEK

SEQ ID NO: 265 - protein, 7 aa, Homo sapiens
SLESALK

SEQ ID NO: 266 - protein, 10 aa, Homo sapiens
VDDQIAIVFK

SEQ ID NO: 267 - protein, 15 aa, Homo sapiens
VLDPAIPIPDPYSSR

SEQ ID NO: 268 - protein, 11 aa, Homo sapiens
ATPFIECNGGR

SEQ ID NO: 269 - protein, 28 aa, Homo sapiens
CSVCEAPAIAIAVHSQDVSIPHCPAGWR

SEQ ID NO: 270 - protein, 12 aa, Homo sapiens
EAQVAHADQQLR

SEQ ID NO: 271 - protein, 15 aa, Homo sapiens
EIILDDDECPLQIFR

SEQ ID NO: 272 - protein, 17 aa, Homo sapiens
TPAAIPATPVAVSQPIR

SEQ ID NO: 273 - protein, 9 aa, Homo sapiens
DLGFFGIYK

SEQ ID NO: 274 - protein, 12 aa, Homo sapiens
EERPAPTPWGSK

SEQ ID NO: 275 - protein, 12 aa, Homo sapiens
YVGFGNTPPPQK

SEQ ID NO: 276 - protein, 10 aa, Homo sapiens
CLFQSPLFAK

SEQ ID NO: 277 - protein, 9 aa, Homo sapiens
SETDTSLIR

SEQ ID NO: 278 - protein, 11 aa, Homo sapiens
ILETWGELLSK

SEQ ID NO: 279 - protein, 16 aa, Homo sapiens
YSGLCPHVVVLVATVR

SEQ ID NO: 280 - protein, 16 aa, Homo sapiens
ENSLLFDPLSSSSSNK

SEQ ID NO: 281 - protein, 12 aa, Homo sapiens
IKNEAEPEFASR

SEQ ID NO: 282 - protein, 14 aa, Homo sapiens
VSAPDGPCPTGFER

SEQ ID NO: 283 - protein, 10 aa, Homo sapiens
AQGIAQGAIR

SEQ ID NO: 284 - protein, 16 aa, Homo sapiens
KVCGDSDKGFVVINQK

SEQ ID NO: 285 - protein, 15 aa, Homo sapiens
LWSGYSLLYFEGQEK

SEQ ID NO: 286 - protein, 16 aa, Homo sapiens
VPIWDQDIQFLPGSQK

SEQ ID NO: 287 - protein, 12 aa, Homo sapiens
YLSYTLNPDLIR

SEQ ID NO: 288 - protein, 10 aa, Homo sapiens
YVIGVGDAFR

SEQ ID NO: 289 - protein, 11 aa, Homo sapiens
DLEVVEGSAAR

SEQ ID NO: 290 - protein, 8 aa, Homo sapiens
FAVGSGSR

SEQ ID NO: 291 - protein, 13 aa, Homo sapiens
GFGQSVVQLQGSR

SEQ ID NO: 292 - protein, 14 aa, Homo sapiens
GLPGEVLGAQPGPR

SEQ ID NO: 293 - protein, 7 aa, Homo sapiens
LAETLGR

SEQ ID NO: 294 - protein, 19 aa, Homo sapiens
LPPKVESLESLYFTPIPAR

SEQ ID NO: 295 - protein, 21 aa, Homo sapiens
PTDSKPEDWDKPEHIPDPDAK

SEQ ID NO: 296 - protein, 11 aa, Homo sapiens
QLSLPQQEAQK

SEQ ID NO: 297 - protein, 9 aa, Homo sapiens
DVTTFFSGK

SEQ ID NO: 298 - protein, 18 aa, Homo sapiens
GQVEQANQELQELIQSVK

SEQ ID NO: 299 - protein, 16 aa, Homo sapiens
IDDVLHTLTGAMSLLR

SEQ ID NO: 300 - protein, 17 aa, Homo sapiens
LQLPNCIEDPVSPIVLR

SEQ ID NO: 301 - protein, 15 aa, Homo sapiens
VESLESLYFTPIPAR

SEQ ID NO: 302 - protein, 21 aa, Homo sapiens
FGDPLGYEDVIPEADREGVIR

SEQ ID NO: 303 - protein, 11 aa, Homo sapiens
LEPNAQAQMYR

SEQ ID NO: 304 - protein, 15 aa, Homo sapiens
DSLEDCVTIWGPEGR

SEQ ID NO: 305 - protein, 13 aa, Homo sapiens
EAVTEILGIEPDR

SEQ ID NO: 306 - protein, 7 aa, Homo sapiens
FQNLDKK

SEQ ID NO: 307 - protein, 12 aa, Homo sapiens
GGECASPLPGLR

SEQ ID NO: 308 - protein, 26 aa, Homo sapiens
IAVSKPSGPQPQADLQALLQSGAQVR

SEQ ID NO: 309 - protein, 23 aa, Homo sapiens
VLELSIPASAEQIQHLAGAIAER

SEQ ID NO: 310 - protein, 27 aa, Homo sapiens
AAPVPTAPAAGAPLMDFGNDFVPPAPR

SEQ ID NO: 311 - protein, 17 aa, Homo sapiens
GGYTCVCPDGFLLDSSR

SEQ ID NO: 312 - protein, 21 aa, Homo sapiens
VLLTRPGEGGTGLPGPPLITR

SEQ ID NO: 313 - protein, 9 aa, Homo sapiens
ELQPQQQPR

SEQ ID NO: 314 - protein, 21 aa, Homo sapiens
FCQLHSSGARPPAPAVPGLTR

SEQ ID NO: 315 - protein, 13 aa, Homo sapiens
LAAGDQLLSVDGR

SEQ ID NO: 316 - protein, 13 aa, Homo sapiens
SLTLDTWEPELLK

SEQ ID NO: 317 - protein, 9 aa, Homo sapiens
EQVPGFTPR

SEQ ID NO: 318 - protein, 9 aa, Homo sapiens
ETGVPIAGR

SEQ ID NO: 319 - protein, 11 aa, Homo sapiens
KITIGQAPTEK

SEQ ID NO: 320 - protein, 20 aa, Homo sapiens
FSTMPFLYCNPGDVCYYASR

SEQ ID NO: 321 - protein, 13 aa, Homo sapiens
LLTIGDANGEIQR

SEQ ID NO: 322 - protein, 13 aa, Homo sapiens
LQSQVISELDACK

SEQ ID NO: 323 - protein, 7 aa, Homo sapiens
LTILAAR

SEQ ID NO: 324 - protein, 11 aa, Homo sapiens
LVECLETVLNK

SEQ ID NO: 325 - protein, 17 aa, Homo sapiens
SSPQFGVTLLTYELLQR

SEQ ID NO: 326 - protein, 12 aa, Homo sapiens
YQCHEEGLVPSK

SEQ ID NO: 327 - protein, 14 aa, Homo sapiens
GCQLCPPFGSEGFR

SEQ ID NO: 328 - protein, 15 aa, Homo sapiens
KPGLEEAVESACAMR

SEQ ID NO: 329 - protein, 11 aa, Homo sapiens
LVQCVDAFEEK

SEQ ID NO: 330 - protein, 10 aa, Homo sapiens
QWFINITDIK

SEQ ID NO: 331 - protein, 9 aa, Homo sapiens
SQLEAIFLR

SEQ ID NO: 332 - protein, 11 aa, Homo sapiens
VLEGSELELAK

SEQ ID NO: 333 - protein, 8 aa, Homo sapiens
VVQDLAAR

SEQ ID NO: 334 - protein, 8 aa, Homo sapiens
AIMEFNPR

SEQ ID NO: 335 - protein, 11 aa, Homo sapiens
ALAEGGSILSR

SEQ ID NO: 336 - protein, 17 aa, Homo sapiens
EICPAGPGYHYSASDLR

SEQ ID NO: 337 - protein, 12 aa, Homo sapiens
EQVVEDRPVGGR

SEQ ID NO: 338 - protein, 14 aa, Homo sapiens
LYCNPGDVCYYASR

SEQ ID NO: 339 - protein, 18 aa, Homo sapiens
TQDASGPELILPASIEFR

SEQ ID NO: 340 - protein, 15 aa, Homo sapiens
YSEIEPSTEGEVIYR

SEQ ID NO: 341 - protein, 15 aa, Homo sapiens
AWCVNCFACSTCNTK

SEQ ID NO: 342 - protein, 23 aa, Homo sapiens
DDPTDSKPEDWDKPEHIPDPDAK

SEQ ID NO: 343 - protein, 12 aa, Homo sapiens
IVQATTLLTMDK

SEQ ID NO: 344 - protein, 10 aa, Homo sapiens
VDLSTSTDWK

SEQ ID NO: 345 - protein, 8 aa, Homo sapiens
AQLLQQTR

SEQ ID NO: 346 - protein, 9 aa, Homo sapiens
DVDECQLFR

SEQ ID NO: 347 - protein, 19 aa, Homo sapiens
IEGYPDPEVVWFKDDQSIR

SEQ ID NO: 348 - protein, 13 aa, Homo sapiens
LSSMAMISGLSGR

SEQ ID NO: 349 - protein, 16 aa, Homo sapiens
NNGVLFENQLLQIGVK

SEQ ID NO: 350 - protein, 8 aa, Homo sapiens
RADPAELR

SEQ ID NO: 351 - protein, 10 aa, Homo sapiens
SAPASQASLR

SEQ ID NO: 352 - protein, 8 aa, Homo sapiens
DWEQFEYK

SEQ ID NO: 353 - protein, 10 aa, Homo sapiens
IQAELAVILK

SEQ ID NO: 354 - protein, 15 aa, Homo sapiens
SNRDELELELAENRK

SEQ ID NO: 355 - protein, 18 aa, Homo sapiens
TPVPEKVPPPKPATPDFR

SEQ ID NO: 356 - protein, 15 aa, Homo sapiens
VSLEPHQGPGTPESK

SEQ ID NO: 357 - protein, 12 aa, Homo sapiens
CTEPEDQLYYVK

SEQ ID NO: 358 - protein, 18 aa, Homo sapiens
ECYFDTAAPDACDNILAR

SEQ ID NO: 359 - protein, 22 aa, Homo sapiens
FGLGSVAGAVGATAVYPIDLVK

SEQ ID NO: 360 - protein, 14 aa, Homo sapiens
GQEDAILSYEPVTR

SEQ ID NO: 361 - protein, 7 aa, Homo sapiens
IMELEGR

SEQ ID NO: 362 - protein, 9 aa, Homo sapiens
TCVSLAVSR

SEQ ID NO: 363 - protein, 15 aa, Homo sapiens
TILTLTGVSTLGDVK

SEQ ID NO: 364 - protein, 17 aa, Homo sapiens
VLQIVTNRDDVQGYAAK

SEQ ID NO: 365 - protein, 19 aa, Homo sapiens
AFGFSHLEALLDDSKELQR

SEQ ID NO: 366 - protein, 20 aa, Homo sapiens
AGPDSAGIALYSHEDVCVFK

SEQ ID NO: 367 - protein, 10 aa, Homo sapiens
AQGVLAAQAR

SEQ ID NO: 368 - protein, 9 aa, Homo sapiens
LPSFQQSCR

SEQ ID NO: 369 - protein, 12 aa, Homo sapiens
MLSSFLSEDVFK

SEQ ID NO: 370 - protein, 12 aa, Homo sapiens
DTEQTLYQVQER

SEQ ID NO: 371 - protein, 15 aa, Homo sapiens
DVEVTKEEFVLAAQK

SEQ ID NO: 372 - protein, 14 aa, Homo sapiens
INQLSEENGDLSFK

SEQ ID NO: 373 - protein, 12 aa, Homo sapiens
LNIPATNVFANR

SEQ ID NO: 374 - protein, 12 aa, Homo sapiens
SLVKPITQLLGR

SEQ ID NO: 375 - protein, 20 aa, Homo sapiens
YLCEGTESPYQTGQLHPAIR

SEQ ID NO: 376 - protein, 17 aa, Homo sapiens
ASMQPIQIAEGTGITTR

SEQ ID NO: 377 - protein, 15 aa, Homo sapiens
IAGALGGLLTPLFLR

SEQ ID NO: 378 - protein, 13 aa, Homo sapiens
LGASALDSIQEFR

SEQ ID NO: 379 - protein, 29 aa, Homo sapiens
SGTIFDNFLITNDEAYAEEFGNETWGVTK

SEQ ID NO: 380 - protein, 17 aa, Homo sapiens
TVLDLQSSLAGVSENLK

SEQ ID NO: 381 - protein, 17 aa, Homo sapiens
AGPDLASCLDVDECRER

SEQ ID NO: 382 - protein, 15 aa, Homo sapiens
EGGTAAGAGLDSLHK

SEQ ID NO: 383 - protein, 7 aa, Homo sapiens
FYEFSQR

SEQ ID NO: 384 - protein, 22 aa, Homo sapiens
GEWIKPGAIVIDCGINYVPDDK

SEQ ID NO: 385 - protein, 16 aa, Homo sapiens
NDPYHPDHFNCANCGK

SEQ ID NO: 386 - protein, 14 aa, Homo sapiens
SLEPHQGPGTPESK

SEQ ID NO: 387 - protein, 11 aa, Homo sapiens
SLGEENFEVVK

SEQ ID NO: 388 - protein, 11 aa, Homo sapiens
THIDTVINALK

SEQ ID NO: 389 - protein, 22 aa, Homo sapiens
VHAELADVLTEAVVDSILAIKK

SEQ ID NO: 390 - protein, 14 aa, Homo sapiens
VMQHQYQVSNLGQR

SEQ ID NO: 391 - protein, 28 aa, Homo sapiens
ASFITPVPGGVGPMTVAMLMQSTVESAK

SEQ ID NO: 392 - protein, 9 aa, Homo sapiens
FEHFIEGGR

SEQ ID NO: 393 - protein, 16 aa, Homo sapiens
LQQAQLYPIAIFIKPK

SEQ ID NO: 394 - protein, 8 aa, Homo sapiens
MTLADIER

SEQ ID NO: 395 - protein, 13 aa, Homo sapiens
TVELLSGVVDQTK

SEQ ID NO: 396 - protein, 9 aa, Homo sapiens
AMDYDLLLR

SEQ ID NO: 397 - protein, 7 aa, Homo sapiens
DFGSFDK

SEQ ID NO: 398 - protein, 19 aa, Homo sapiens
EPAVYFKEQFLDGDGWTSR

SEQ ID NO: 399 - protein, 17 aa, Homo sapiens
FLINLEGGDIREESSYK

SEQ ID NO: 400 - protein, 27 aa, Homo sapiens
GEWIKPGAIVIDCGINYVPDDKKPNGR

SEQ ID NO: 401 - protein, 7 aa, Homo sapiens
HAVVVGR

SEQ ID NO: 402 - protein, 14 aa, Homo sapiens
LEGDTFLLLIQSLK

SEQ ID NO: 403 - protein, 11 aa, Homo sapiens
NTSVVDSEPVR

SEQ ID NO: 404 - protein, 9 aa, Homo sapiens
PGTTDQVPR

SEQ ID NO: 405 - protein, 10 aa, Homo sapiens
QLDQHLDLLK

SEQ ID NO: 406 - protein, 12 aa, Homo sapiens
TVIVHGFTLGEK

SEQ ID NO: 407 - protein, 15 aa, Homo sapiens
YAPDDIPNINSTCFK

SEQ ID NO: 408 - protein, 11 aa, Homo sapiens
AADLLYAMCDR

SEQ ID NO: 409 - protein, 12 aa, Homo sapiens
EMGEAFAADIPR

SEQ ID NO: 410 - protein, 10 aa, Homo sapiens
IQGTLQPHAR

SEQ ID NO: 411 - protein, 17 aa, Homo sapiens
LPIAVNGSLIYGVCAGK

SEQ ID NO: 412 - protein, 12 aa, Homo sapiens
VNDDLISEFPHK

SEQ ID NO: 413 - protein, 10 aa, Homo sapiens
DGGCSLPILR

SEQ ID NO: 414 - protein, 11 aa, Homo sapiens
ENVDYIIQELR

SEQ ID NO: 415 - protein, 9 aa, Homo sapiens
GAAVDEYFR

SEQ ID NO: 416 - protein, 13 aa, Homo sapiens
GETAVPGAPEALR

SEQ ID NO: 417 - protein, 10 aa, Homo sapiens
ILYSFATAFR

SEQ ID NO: 418 - protein, 11 aa, Homo sapiens
NVFECNDQVVK

SEQ ID NO: 419 - protein, 12 aa, Homo sapiens
STGSFVGELMYK

SEQ ID NO: 420 - protein, 14 aa, Homo sapiens
TIRDLEVVEGSAAR

SEQ ID NO: 421 - protein, 17 aa, Homo sapiens
TVFEALQAPACHENMVK

SEQ ID NO: 422 - protein, 11 aa, Homo sapiens
VGLLQYGSTVK

SEQ ID NO: 423 - protein, 16 aa, Homo sapiens
YVLSNQYRPDISPTER

SEQ ID NO: 424 - protein, 14 aa, Homo sapiens
AEAELEYNPEHVSR

SEQ ID NO: 425 - protein, 14 aa, Homo sapiens
ASPDLVPMGEWTAR

SEQ ID NO: 426 - protein, 18 aa, Homo sapiens
CEACAPGHFGDPSRPGGR

SEQ ID NO: 427 - protein, 15 aa, Homo sapiens
EDGYSDASGFGYCFR

SEQ ID NO: 428 - protein, 12 aa, Homo sapiens
GDLIGVVEALTR

SEQ ID NO: 429 - protein, 19 aa, Homo sapiens
LAILQVGNRDDSNLYINVK

SEQ ID NO: 430 - protein, 24 aa, Homo sapiens
NDAGQAECSCQVTVDDAPASENTK

SEQ ID NO: 431 - protein, 12 aa, Homo sapiens
QNWFEAFEILDK

SEQ ID NO: 432 - protein, 17 aa, Homo sapiens
SSEGLLATATVPLDLFK

SEQ ID NO: 433 - protein, 24 aa, Homo sapiens
STTTIGLVQALGAHLYQNVFACVR

SEQ ID NO: 434 - protein, 17 aa, Homo sapiens
VLVLEMFSGGDAAALER

SEQ ID NO: 435 - protein, 10 aa, Homo sapiens
KQVAPEKPVK

SEQ ID NO: 436 - protein, 13 aa, Homo sapiens
LQELEGTYEENER

SEQ ID NO: 437 - protein, 21 aa, Homo sapiens
LVEQHGSDIWWTLPPEQLLPK

SEQ ID NO: 438 - protein, 18 aa, Homo sapiens
NPTFMCLALHCIANVGSR

SEQ ID NO: 439 - protein, 13 aa, Homo sapiens
SSDGRPDSGGTLR

SEQ ID NO: 440 - protein, 16 aa, Homo sapiens
AAPQPLNLVSSVTLSK

SEQ ID NO: 441 - protein, 15 aa, Homo sapiens
AVQAQGGESQQEAQR

SEQ ID NO: 442 - protein, 19 aa, Homo sapiens
DFLNQEGADPDSIEMVATR

SEQ ID NO: 443 - protein, 9 aa, Homo sapiens
GQVLDVVER

SEQ ID NO: 444 - protein, 8 aa, Homo sapiens
LALIQPSR

SEQ ID NO: 445 - protein, 10 aa, Homo sapiens
LQQDVLQFQK

SEQ ID NO: 446 - protein, 8 aa, Homo sapiens
LTFEELER

SEQ ID NO: 447 - protein, 10 aa, Homo sapiens
QVTPLFIHFR

SEQ ID NO: 448 - protein, 14 aa, Homo sapiens
SFNVQDLLPDHEYK

SEQ ID NO: 449 - protein, 13 aa, Homo sapiens
SSCISQHVISEAK

SEQ ID NO: 450 - protein, 8 aa, Homo sapiens
VLQIVTNR

SEQ ID NO: 451 - protein, 11 aa, Homo sapiens
VVGDVAYDEAK

SEQ ID NO: 452 - protein, 10 aa, Homo sapiens
ALQSGPPQSR

SEQ ID NO: 453 - protein, 10 aa, Homo sapiens
ITIGQAPTEK

SEQ ID NO: 454 - protein, 11 aa, Homo sapiens
KAQGVLAAQAR

SEQ ID NO: 455 - protein, 15 aa, Homo sapiens
LKENLYPYLGPSTLR

SEQ ID NO: 456 - protein, 7 aa, Homo sapiens
LPVTINK

SEQ ID NO: 457 - protein, 17 aa, Homo sapiens
SILTAIPNDDPYFHITK

SEQ ID NO: 458 - protein, 20 aa, Homo sapiens
SLGNVIHPDVVVNGGQDQSK

SEQ ID NO: 459 - protein, 11 aa, Homo sapiens
AVQTSIATAYR

SEQ ID NO: 460 - protein, 11 aa, Homo sapiens
DASKPEDWDER

SEQ ID NO: 461 - protein, 10 aa, Homo sapiens
IPVSGPFLVK

SEQ ID NO: 462 - protein, 11 aa, Homo sapiens
LLGPAGLTWER

SEQ ID NO: 463 - protein, 12 aa, Homo sapiens
LPVEAFSAVFTK

SEQ ID NO: 464 - protein, 22 aa, Homo sapiens
SEESTTVHSSPGATGTALFPTR

SEQ ID NO: 465 - protein, 22 aa, Homo sapiens
SEESTTVHSSPGATGTALFPTR

SEQ ID NO: 466 - protein, 22 aa, Homo sapiens
SEESTTVHSSPGATGTALFPTR

SEQ ID NO: 467 - protein, 23 aa, Homo sapiens
TKVHAELADVLTEAVVDSILAIK

SEQ ID NO: 468 - protein, 15 aa, Homo sapiens
YGEGHQAWIIGIVEK

SEQ ID NO: 469 - protein, 8 aa, Homo sapiens
ADLYLEGK

SEQ ID NO: 470 - protein, 12 aa, Homo sapiens
CLEEKNEILQGK

SEQ ID NO: 471 - protein, 16 aa, Homo sapiens
FIFDCVSQEYGINPER

SEQ ID NO: 472 - protein, 12 aa, Homo sapiens
IHGTEEGQQILK

SEQ ID NO: 473 - protein, 8 aa, Homo sapiens
KIQTQLQR

SEQ ID NO: 474 - protein, 12 aa, Homo sapiens
KVVGDVAYDEAK

SEQ ID NO: 475 - protein, 10 aa, Homo sapiens
LDSISGNLQR

SEQ ID NO: 476 - protein, 12 aa, Homo sapiens
LFEDLEFQQLER

SEQ ID NO: 477 - protein, 30 aa, Homo sapiens
SLGNVIHPDVVVNGGQDQSKEPPYGADVLR

SEQ ID NO: 478 - protein, 10 aa, Homo sapiens
TEVNSGFFYK

SEQ ID NO: 479 - protein, 30 aa, Homo sapiens
TSAGTFPGSQPQAPASPVLPARPPPPPLPR

SEQ ID NO: 480 - protein, 10 aa, Homo sapiens
VHSPQQVDFR

SEQ ID NO: 481 - protein, 17 aa, Homo sapiens
VLTGNTIALVLGGGGAR

SEQ ID NO: 482 - protein, 8 aa, Homo sapiens
VSALSVVR

SEQ ID NO: 483 - protein, 15 aa, Homo sapiens
ASLENGVLLCDLINK

SEQ ID NO: 484 - protein, 8 aa, Homo sapiens
ETLIDVAR

SEQ ID NO: 485 - protein, 11 aa, Homo sapiens
FESKPQSQEVK

SEQ ID NO: 486 - protein, 38 aa, Homo sapiens
GHLQIAACPNQDPLQGTTGLIPLLGIDVWEHAYYLQYK

SEQ ID NO: 487 - protein, 22 aa, Homo sapiens
GICEALEDSDGRQDSPAGELPK

SEQ ID NO: 488 - protein, 12 aa, Homo sapiens
GYLAPSGDLSLR

SEQ ID NO: 489 - protein, 16 aa, Homo sapiens
LQSQLLSIEKEVEEYK

SEQ ID NO: 490 - protein, 21 aa, Homo sapiens
SGQGSDRGSGSRPGIEGDTPR

SEQ ID NO: 491 - protein, 8 aa, Homo sapiens
VAISTFQK

SEQ ID NO: 492 - protein, 12 aa, Homo sapiens
GQDIFIIQTIPR

SEQ ID NO: 493 - protein, 18 aa, Homo sapiens
ITLDAQDVLAHLVQMAFK

SEQ ID NO: 494 - protein, 13 aa, Homo sapiens
RTEVPPLLLILDR

SEQ ID NO: 495 - protein, 13 aa, Homo sapiens
SSPPVQFSLLHSK

SEQ ID NO: 496 - protein, 14 aa, Homo sapiens
SSTGSPTSPLNAEK

SEQ ID NO: 497 - protein, 10 aa, Homo sapiens
TKFPAEQYYR

SEQ ID NO: 498 - protein, 18 aa, Homo sapiens
ANFWYQPSFHGVDLSALR

SEQ ID NO: 499 - protein, 10 aa, Homo sapiens
DAQIAMMQQR

SEQ ID NO: 500 - protein, 9 aa, Homo sapiens
EHGAFDAVK

SEQ ID NO: 501 - protein, 19 aa, Homo sapiens
GLAQADGTLITCVDSGILR

SEQ ID NO: 502 - protein, 12 aa, Homo sapiens
GLNCEQCQDFYR

SEQ ID NO: 503 - protein, 14 aa, Homo sapiens
KVVATTQMQAADAR

SEQ ID NO: 504 - protein, 13 aa, Homo sapiens
MKLTHSLQEELEK

SEQ ID NO: 505 - protein, 12 aa, Homo sapiens
NIDVFNVEDQKR

SEQ ID NO: 506 - protein, 19 aa, Homo sapiens
QASDKDDRPFQGEDVENSR

SEQ ID NO: 507 - protein, 27 aa, Homo sapiens
SLDQTDMHGDSEYNIMFGPDICGPGTK

SEQ ID NO: 508 - protein, 25 aa, Homo sapiens
STIFHSSPDASGTTPSSAHSTTSGR

SEQ ID NO: 509 - protein, 25 aa, Homo sapiens
STIFHSSPDASGTTPSSAHSTTSGR

SEQ ID NO: 510 - protein, 25 aa, Homo sapiens
STIFHSSPDASGTTPSSAHSTTSGR

SEQ ID NO: 511 - protein, 25 aa, Homo sapiens
STIFHSSPDASGTTPSSAHSTTSGR

SEQ ID NO: 512 - protein, 7 aa, Homo sapiens
VCLHVQK

SEQ ID NO: 513 - protein, 14 aa, Homo sapiens
VSQFLQVLETDLYR

SEQ ID NO: 514 - protein, 17 aa, Homo sapiens
VSSTATTQDVIETLAEK

SEQ ID NO: 515 - protein, 12 aa, Homo sapiens
YNTRPLGQEPPR

SEQ ID NO: 516 - protein, 11 aa, Homo sapiens
ANHPMDAEVTK

SEQ ID NO: 517 - protein, 19 aa, Homo sapiens
ASELGHSLNENVLKPAQEK

SEQ ID NO: 518 - protein, 17 aa, Homo sapiens
AWVSHDSTVCLADADKK

SEQ ID NO: 519 - protein, 13 aa, Homo sapiens
FSYDLSQCINQMK

SEQ ID NO: 520 - protein, 10 aa, Homo sapiens
IYQFTAASPK

SEQ ID NO: 521 - protein, 17 aa, Homo sapiens
KQDEPIDLFMIEIMEMK

SEQ ID NO: 522 - protein, 13 aa, Homo sapiens
NIMAGLQQTNSEK

SEQ ID NO: 523 - protein, 6 aa, Homo sapiens
RPDYLK

SEQ ID NO: 524 - protein, 22 aa, Homo sapiens
SEESTTVHSSPVATATTPSPAR

SEQ ID NO: 525 - protein, 22 aa, Homo sapiens
SEESTTVHSSPVATATTPSPAR

SEQ ID NO: 526 - protein, 22 aa, Homo sapiens
SEESTTVHSSPVATATTPSPAR

SEQ ID NO: 527 - protein, 22 aa, Homo sapiens
SEESTTVHSSPVATATTPSPAR

SEQ ID NO: 528 - protein, 7 aa, Homo sapiens
THLTSLK

SEQ ID NO: 529 - protein, 9 aa, Homo sapiens
AQEAEQLLR

SEQ ID NO: 530 - protein, 15 aa, Homo sapiens
AQIINDAFNLASAHK

SEQ ID NO: 531 - protein, 18 aa, Homo sapiens
DQLGGWFQSSLLTSVAAR

SEQ ID NO: 532 - protein, 14 aa, Homo sapiens
GADDIELLPEAQHK

SEQ ID NO: 533 - protein, 13 aa, Homo sapiens
GFSHLEALLDDSK

SEQ ID NO: 534 - protein, 16 aa, Homo sapiens
GLLTDSPAATVLAEAR

SEQ ID NO: 535 - protein, 12 aa, Homo sapiens
HSNFLGAYDSIR

SEQ ID NO: 536 - protein, 10 aa, Homo sapiens
KNEFQGELEK

SEQ ID NO: 537 - protein, 14 aa, Homo sapiens
SFLEEVLASGLHSR

SEQ ID NO: 538 - protein, 12 aa, Homo sapiens
TEILGIEPDREK

SEQ ID NO: 539 - protein, 12 aa, Homo sapiens
VILLDPSIIEAK

SEQ ID NO: 540 - protein, 13 aa, Homo sapiens
AETVQAALEEAQR

SEQ ID NO: 541 - protein, 10 aa, Homo sapiens
AFVENYPQFK

SEQ ID NO: 542 - protein, 8 aa, Homo sapiens
DFISNLLK

SEQ ID NO: 543 - protein, 11 aa, Homo sapiens
DGFFGLSISDR

SEQ ID NO: 544 - protein, 13 aa, Homo sapiens
DHVFQVNNFEALK

SEQ ID NO: 545 - protein, 22 aa, Homo sapiens
DPTDSKPEDWDKPEHIPDPDAK

SEQ ID NO: 546 - protein, 6 aa, Homo sapiens
KIIELK

SEQ ID NO: 547 - protein, 21 aa, Homo sapiens
LCCPVALAQDVTGALEDALAK

SEQ ID NO: 548 - protein, 14 aa, Homo sapiens
PAIAHLIHSLNPVR

SEQ ID NO: 549 - protein, 18 aa, Homo sapiens
PSSTPTTHFSASSTTLGR

SEQ ID NO: 550 - protein, 18 aa, Homo sapiens
PSSTPTTHFSASSTTLGR

SEQ ID NO: 551 - protein, 18 aa, Homo sapiens
PSSTPTTHFSASSTTLGR

SEQ ID NO: 552 - protein, 18 aa, Homo sapiens
PSSTPTTHFSASSTTLGR

SEQ ID NO: 553 - protein, 18 aa, Homo sapiens
PSSTPTTHFSASSTTLGR

SEQ ID NO: 554 - protein, 18 aa, Homo sapiens
PSSTPTTHFSASSTTLGR

SEQ ID NO: 555 - protein, 18 aa, Homo sapiens
PSSTPTTHFSASSTTLGR

SEQ ID NO: 556 - protein, 15 aa, Homo sapiens
QFVTGIIDSLTISPK

SEQ ID NO: 557 - protein, 14 aa, Homo sapiens
SEAVLQSPEFAIFR

SEQ ID NO: 558 - protein, 13 aa, Homo sapiens
TTQGLTALLLSLK

SEQ ID NO: 559 - protein, 18 aa, Homo sapiens
VPLSVQLKPEVSPTQDIR

SEQ ID NO: 560 - protein, 7 aa, Homo sapiens
VTAIDFR

SEQ ID NO: 561 - protein, 17 aa, Homo sapiens
YLIFPNPVCLEPGISYK

SEQ ID NO: 562 - protein, 13 aa, Homo sapiens
YRLPNTLKPDSYR

SEQ ID NO: 563 - protein, 10 aa, Homo sapiens
AFLLSLAALR

SEQ ID NO: 564 - protein, 18 aa, Homo sapiens
DLAQYSSNDAVVETSLTK

SEQ ID NO: 565 - protein, 21 aa, Homo sapiens
DRLPQEPGREQVVEDRPVGGR

SEQ ID NO: 566 - protein, 14 aa, Homo sapiens
EAIQHPADEKLQEK

SEQ ID NO: 567 - protein, 9 aa, Homo sapiens
EFQNNPNPR

SEQ ID NO: 568 - protein, 10 aa, Homo sapiens
ELSAALQDKK

SEQ ID NO: 569 - protein, 9 aa, Homo sapiens
ELSGSGLER

SEQ ID NO: 570 - protein, 7 aa, Homo sapiens
ELWILNR

SEQ ID NO: 571 - protein, 15 aa, Homo sapiens
FSTEYELQQLEQFKK

SEQ ID NO: 572 - protein, 9 aa, Homo sapiens
GPALCGSQR

SEQ ID NO: 573 - protein, 18 aa, Homo sapiens
GPLEPGPPKPGVPQEPGR

SEQ ID NO: 574 - protein, 17 aa, Homo sapiens
GSLYQCDYSTGSCEPIR

SEQ ID NO: 575 - protein, 7 aa, Homo sapiens
IQTQLQR

SEQ ID NO: 576 - protein, 19 aa, Homo sapiens
KNSSIIGDYKQICSQLSER

SEQ ID NO: 577 - protein, 10 aa, Homo sapiens
LEINFEELLK

SEQ ID NO: 578 - protein, 13 aa, Homo sapiens
LIVPEPDVDFDAK

SEQ ID NO: 579 - protein, 22 aa, Homo sapiens
LVGPEGFVVTEAGFGADIGMEK

SEQ ID NO: 580 - protein, 14 aa, Homo sapiens
QEHCGCYTLLVENK

SEQ ID NO: 581 - protein, 14 aa, Homo sapiens
RSQAGVSSGAPPGR

SEQ ID NO: 582 - protein, 22 aa, Homo sapiens
SPGSTPTTHFPASSTTSGHSEK

SEQ ID NO: 583 - protein, 22 aa, Homo sapiens
SPGSTPTTHFPASSTTSGHSEK

SEQ ID NO: 584 - protein, 22 aa, Homo sapiens
SPGSTPTTHFPASSTTSGHSEK

SEQ ID NO: 585 - protein, 22 aa, Homo sapiens
SPGSTPTTHFPASSTTSGHSEK

SEQ ID NO: 586 - protein, 10 aa, Homo sapiens
VLSQIDVAQK

SEQ ID NO: 587 - protein, 15 aa, Homo sapiens
YGGMFCNVEGAFESK

SEQ ID NO: 588 - protein, 30 aa, Homo sapiens
ATVVVEATEPEPSGSIANPAASTSPSLSHR

SEQ ID NO: 589 - protein, 10 aa, Homo sapiens
EMTADVIELK

SEQ ID NO: 590 - protein, 21 aa, Homo sapiens
GEQGFMGNTGPTGAVGDRGPK

SEQ ID NO: 591 - protein, 15 aa, Homo sapiens
LAEAELEYNPEHVSR

SEQ ID NO: 592 - protein, 28 aa, Homo sapiens
LESEEDVSQAFLEAVAEEKPHVKPYFSK

SEQ ID NO: 593 - protein, 12 aa, Homo sapiens
LMCELGNDVINR

SEQ ID NO: 594 - protein, 11 aa, Homo sapiens
QQQDYWLIDVR

SEQ ID NO: 595 - protein, 17 aa, Homo sapiens
SSEGGTAAGAGLDSLHK

SEQ ID NO: 596 - protein, 12 aa, Homo sapiens
SYKPVFWSPSSR

SEQ ID NO: 597 - protein, 25 aa, Homo sapiens
TAHLDEEVNKGDILVVATGQPEMVK

SEQ ID NO: 598 - protein, 10 aa, Homo sapiens
TRPDGNCFYR

SEQ ID NO: 599 - protein, 8 aa, Homo sapiens
TSGQCLCR

SEQ ID NO: 600 - protein, 7 aa, Homo sapiens
AFCVANK

SEQ ID NO: 601 - protein, 9 aa, Homo sapiens
AMISGLSGR

SEQ ID NO: 602 - protein, 22 aa, Homo sapiens
AVESSKPLSNAQPSGPLKPVGN

SEQ ID NO: 603 - protein, 19 aa, Homo sapiens
AYHSFLVEPISCHAWNKDR

SEQ ID NO: 604 - protein, 11 aa, Homo sapiens
EGVVDIYNCVK

SEQ ID NO: 605 - protein, 36 aa, Homo sapiens
GTWIHPEIDNPEYSPDPSIYAYDNFGVLGLDLWQVK

SEQ ID NO: 606 - protein, 10 aa, Homo sapiens
HLTQAVCTVK

SEQ ID NO: 607 - protein, 16 aa, Homo sapiens
ITISPLQELTLYNPER

SEQ ID NO: 608 - protein, 16 aa, Homo sapiens
LACESASSTEVSGALK

SEQ ID NO: 609 - protein, 14 aa, Homo sapiens
LDCTQCLQHPWLMK

SEQ ID NO: 610 - protein, 29 aa, Homo sapiens
LDEEAENLVATVVPTHLAAAVPEVAVYLK

SEQ ID NO: 611 - protein, 45 aa, Homo sapiens
LPEDDEPPARPPPPPPASVSPQAEPVWTPPAPAPAAPPSTPAAPK

SEQ ID NO: 612 - protein, 11 aa, Homo sapiens
LPNTLKPDSYR

SEQ ID NO: 613 - protein, 11 aa, Homo sapiens
LSSTQQSLAEK

SEQ ID NO: 614 - protein, 10 aa, Homo sapiens
LVALETGIQK

SEQ ID NO: 615 - protein, 16 aa, Homo sapiens
MHGGGPTVTAGLPLPK

SEQ ID NO: 616 - protein, 16 aa, Homo sapiens
QQALELVVQEVSSVLR

SEQ ID NO: 617 - protein, 12 aa, Homo sapiens
QSMAFSILNTPK

SEQ ID NO: 618 - protein, 8 aa, Homo sapiens
SSNLLDLK

SEQ ID NO: 619 - protein, 7 aa, Homo sapiens
VLQDQLK

SEQ ID NO: 620 - protein, 16 aa, Homo sapiens
WVSHDSTVCLADADKK

SEQ ID NO: 621 - protein, 10 aa, Homo sapiens
AAQLDGLEAR

SEQ ID NO: 622 - protein, 11 aa, Homo sapiens
ANALASATCER

SEQ ID NO: 623 - protein, 13 aa, Homo sapiens
ATDNEPSQFSEPR

SEQ ID NO: 624 - protein, 11 aa, Homo sapiens
CGFSELYSWQR

SEQ ID NO: 625 - protein, 9 aa, Homo sapiens
DLLQAAQDK

SEQ ID NO: 626 - protein, 15 aa, Homo sapiens
EPAPASPAPAGVEIR

SEQ ID NO: 627 - protein, 8 aa, Homo sapiens
EYELFEFR

SEQ ID NO: 628 - protein, 27 aa, Homo sapiens
HKPGIVQETTFDLGGDIHSGTALPTSK

SEQ ID NO: 629 - protein, 13 aa, Homo sapiens
IWDLQGSEEPVFR

SEQ ID NO: 630 - protein, 11 aa, Homo sapiens
LFGDVEASLGR

SEQ ID NO: 631 - protein, 12 aa, Homo sapiens
LHTLGDNLLDPR

SEQ ID NO: 632 - protein, 8 aa, Homo sapiens
RFSDIQIR

SEQ ID NO: 633 - protein, 8 aa, Homo sapiens
SEVYGPMK

SEQ ID NO: 634 - protein, 9 aa, Homo sapiens
SLSESAATR

SEQ ID NO: 635 - protein, 15 aa, Homo sapiens
VTCVEMEPLAEYVVR

SEQ ID NO: 636 - protein, 10 aa, Homo sapiens
YLFEEDNLLR

SEQ ID NO: 637 - protein, 12 aa, Homo sapiens
AAECLDVDECHR

SEQ ID NO: 638 - protein, 8 aa, Homo sapiens
AGMSSLKG

SEQ ID NO: 639 - protein, 9 aa, Homo sapiens
ALASATCER

SEQ ID NO: 640 - protein, 17 aa, Homo sapiens
CDSHDDPALGLVSGQCR

SEQ ID NO: 641 - protein, 11 aa, Homo sapiens
DCSIALPYVCK

SEQ ID NO: 642 - protein, 20 aa, Homo sapiens
DISLQGPGLAPEHCYIENLR

SEQ ID NO: 643 - protein, 21 aa, Homo sapiens
FVLDHEDGLNLNEDLENFLQK

SEQ ID NO: 644 - protein, 31 aa, Homo sapiens
GANQHATDEEGKDPLSIAVEAANADIVTLLR

SEQ ID NO: 645 - protein, 17 aa, Homo sapiens
GFSHLEALLDDSKELQR

SEQ ID NO: 646 - protein, 13 aa, Homo sapiens
GSGVSNFAQLIVR

SEQ ID NO: 647 - protein, 13 aa, Homo sapiens
IINDAFNLASAHK

SEQ ID NO: 648 - protein, 11 aa, Homo sapiens
KVVQSLEQTAR

SEQ ID NO: 649 - protein, 18 aa, Homo sapiens
QPAVEEPAEVTATVLASR

SEQ ID NO: 650 - protein, 15 aa, Homo sapiens
QTQVLGLTQTCETLK

SEQ ID NO: 651 - protein, 18 aa, Homo sapiens
RVEDAYILTCNVSLEYEK

SEQ ID NO: 652 - protein, 12 aa, Homo sapiens
TLDFDALSVGQR

SEQ ID NO: 653 - protein, 7 aa, Homo sapiens
VVNAMGK

SEQ ID NO: 654 - protein, 22 aa, Homo sapiens
AKIDDPTDSKPEDWDKPEHIPD

SEQ ID NO: 655 - protein, 14 aa, Homo sapiens
ALEQLLTELDDFLK

SEQ ID NO: 656 - protein, 10 aa, Homo sapiens
ASKPEDWDER

SEQ ID NO: 657 - protein, 13 aa, Homo sapiens
DLNQLFQQDSSSR

SEQ ID NO: 658 - protein, 37 aa, Homo sapiens
ETPGRPPDPTGAPLPGPTGDPVKPTSLETPSAPLLSR

SEQ ID NO: 659 - protein, 22 aa, Homo sapiens
GSACEEDVDECAQEPPPCGPGR

SEQ ID NO: 660 - protein, 19 aa, Homo sapiens
KASSEGGTAAGAGLDSLHK

SEQ ID NO: 661 - protein, 10 aa, Homo sapiens
LGFITNNSSK

SEQ ID NO: 662 - protein, 12 aa, Homo sapiens
LPSHSDFLAELR

SEQ ID NO: 663 - protein, 10 aa, Homo sapiens
LQDVHVAEGK

SEQ ID NO: 664 - protein, 11 aa, Homo sapiens
LVTCTGYHQVR

SEQ ID NO: 665 - protein, 9 aa, Homo sapiens
SIQLPTTVR

SEQ ID NO: 666 - protein, 7 aa, Homo sapiens
VLSELGR

SEQ ID NO: 667 - protein, 15 aa, Homo sapiens
WAPNENKFAVGSGSR

SEQ ID NO: 668 - protein, 23 aa, Homo sapiens
AQELQQTGVLGAFESSFWHMQEK

SEQ ID NO: 669 - protein, 28 aa, Homo sapiens
ASAAAAAGGGATGHPGGGQGAENPAGLK

SEQ ID NO: 670 - protein, 17 aa, Homo sapiens
EAENFHEEDDVDVRPAR

SEQ ID NO: 671 - protein, 14 aa, Homo sapiens
ERLPSHSDFLAELR

SEQ ID NO: 672 - protein, 18 aa, Homo sapiens
EWSLESSPAQNWTPPQPR

SEQ ID NO: 673 - protein, 15 aa, Homo sapiens
FYALSASFEPFSNKG

SEQ ID NO: 674 - protein, 24 aa, Homo sapiens
GISLNPEQWSQLKEQISDIDDAVR

SEQ ID NO: 675 - protein, 14 aa, Homo sapiens
HPLLVGHMPVMVAK

SEQ ID NO: 676 - protein, 12 aa, Homo sapiens
IAHGNSSIIADR

SEQ ID NO: 677 - protein, 13 aa, Homo sapiens
IYADSLKPNIPYK

SEQ ID NO: 678 - protein, 12 aa, Homo sapiens
LAILDSQAGQIR

SEQ ID NO: 679 - protein, 13 aa, Homo sapiens
NMVVDDDSPEMYK

SEQ ID NO: 680 - protein, 16 aa, Homo sapiens
NRLDCTQCLQHPWLMK

SEQ ID NO: 681 - protein, 12 aa, Homo sapiens
PVLLQVAESAYR

SEQ ID NO: 682 - protein, 26 aa, Homo sapiens
QEPLGSDSEGVNCLAYDEAIMAQQDR

SEQ ID NO: 683 - protein, 14 aa, Homo sapiens
QEVEELWIGLNDLK

SEQ ID NO: 684 - protein, 12 aa, Homo sapiens
SFVIHNLPVLAK

SEQ ID NO: 685 - protein, 9 aa, Homo sapiens
STTFHSSPR

SEQ ID NO: 686 - protein, 9 aa, Homo sapiens
STTFHSSPR

SEQ ID NO: 687 - protein, 9 aa, Homo sapiens
STTFHSSPR

SEQ ID NO: 688 - protein, 31 aa, Homo sapiens
TAAGLMHTFNAHAATDITGFGILGHAQNLAK

SEQ ID NO: 689 - protein, 7 aa, Homo sapiens
TGAFGLR

SEQ ID NO: 690 - protein, 9 aa, Homo sapiens
TSLTVVLLR

SEQ ID NO: 691 - protein, 14 aa, Homo sapiens
VPPLLIYGPFGTGK

SEQ ID NO: 692 - protein, 8 aa, Homo sapiens
VPSFAAGR

SEQ ID NO: 693 - protein, 15 aa, Homo sapiens
VPVGDQPPDIEFQIR

SEQ ID NO: 694 - protein, 9 aa, Homo sapiens
VYDPASPQR

SEQ ID NO: 695 - protein, 19 aa, Homo sapiens
WFYIDFGGVKPMGSEPVPK

SEQ ID NO: 696 - protein, 19 aa, Homo sapiens
WTPPAPAPAAPPSTPAAPK

SEQ ID NO: 697 - protein, 14 aa, Homo sapiens
YDNQWFHGCTSTGR

SEQ ID NO: 698 - protein, 19 aa, Homo sapiens
YFSYDCGADFPGVPLAPPR

SEQ ID NO: 699 - protein, 17 aa, Homo sapiens
YGDEEKDKGLQTSQDAR

SEQ ID NO: 700 - protein, 10 aa, Homo sapiens
YLETADYAIR

SEQ ID NO: 701 - protein, 31 aa, Homo sapiens
AKQPDLAPGLTTIGASPTQTVTLVTQPVVTK

SEQ ID NO: 702 - protein, 14 aa, Homo sapiens
ASPLLPANHVTMAK

SEQ ID NO: 703 - protein, 13 aa, Homo sapiens
AVLELLQRPGNAR

SEQ ID NO: 704 - protein, 12 aa, Homo sapiens
CFQVQGQEPQSR

SEQ ID NO: 705 - protein, 11 aa, Homo sapiens
DKGLQTSQDAR

SEQ ID NO: 706 - protein, 11 aa, Homo sapiens
DLTALSNMLPK

SEQ ID NO: 707 - protein, 10 aa, Homo sapiens
DPFSLDALSK

SEQ ID NO: 708 - protein, 16 aa, Homo sapiens
FGDPLGYEDVIPEADR

SEQ ID NO: 709 - protein, 9 aa, Homo sapiens
FGLYLPLFK

SEQ ID NO: 710 - protein, 14 aa, Homo sapiens
FSTEYELQQLEQFK

SEQ ID NO: 711 - protein, 21 aa, Homo sapiens
GAVYLFHGTSGSGISPSHSQR

SEQ ID NO: 712 - protein, 10 aa, Homo sapiens
HLCELLAQQF

SEQ ID NO: 713 - protein, 14 aa, Homo sapiens
ILDQENLSSTALVK

SEQ ID NO: 714 - protein, 12 aa, Homo sapiens
ISETTMLQSGMK

SEQ ID NO: 715 - protein, 20 aa, Homo sapiens
ISYHGSCPQGLADSAWIPFR

SEQ ID NO: 716 - protein, 13 aa, Homo sapiens
KQNWFEAFEILDK

SEQ ID NO: 717 - protein, 11 aa, Homo sapiens
PISLVFLVPVR

SEQ ID NO: 718 - protein, 10 aa, Homo sapiens
SKESSQVTSR

SEQ ID NO: 719 - protein, 9 aa, Homo sapiens
SPPPCTYGR

SEQ ID NO: 720 - protein, 11 aa, Homo sapiens
SQLNCLLLSGR

SEQ ID NO: 721 - protein, 34 aa, Homo sapiens
TPLSAAAHTHPVYCVNVVGTQNAHNLITVSTDGK

SEQ ID NO: 722 - protein, 9 aa, Homo sapiens
VNYDEENWR

SEQ ID NO: 723 - protein, 13 aa, Homo sapiens
VSFVIHNLPVLAK

SEQ ID NO: 724 - protein, 12 aa, Homo sapiens
VTLRPYLTPNDR

SEQ ID NO: 725 - protein, 12 aa, Homo sapiens
WNVINWENVTER

SEQ ID NO: 726 - protein, 10 aa, Homo sapiens
ADTDGGLIFR

SEQ ID NO: 727 - protein, 7 aa, Homo sapiens
AGYTGLR

SEQ ID NO: 728 - protein, 24 aa, Homo sapiens
AVESSKPLSNAQPSGPLKPVGNAK

SEQ ID NO: 729 - protein, 13 aa, Homo sapiens
CSEGFVLAEDGRR

SEQ ID NO: 730 - protein, 10 aa, Homo sapiens
DLMVLNDVYR

SEQ ID NO: 731 - protein, 8 aa, Homo sapiens
FPAEQYYR

SEQ ID NO: 732 - protein, 15 aa, Homo sapiens
FTGHCSCRPGVSGVR

SEQ ID NO: 733 - protein, 15 aa, Homo sapiens
GDPGDTGAPGPVGMK

SEQ ID NO: 734 - protein, 19 aa, Homo sapiens
GGPSLSSVLNELPSAATLR

SEQ ID NO: 735 - protein, 17 aa, Homo sapiens
IKDPDASKPEDWDERAK

SEQ ID NO: 736 - protein, 13 aa, Homo sapiens
ILCIGAVPGLQPR

SEQ ID NO: 737 - protein, 17 aa, Homo sapiens
IQSDLTSHEISLEEMKK

SEQ ID NO: 738 - protein, 13 aa, Homo sapiens
ITGHFYACQVAQR

SEQ ID NO: 739 - protein, 14 aa, Homo sapiens
KVVGDVAYDEAKER

SEQ ID NO: 740 - protein, 14 aa, Homo sapiens
LDTDILLGATCGLK

SEQ ID NO: 741 - protein, 11 aa, Homo sapiens
LVSAVVEYGGK

SEQ ID NO: 742 - protein, 24 aa, Homo sapiens
MLGVAAGMTHSNMANALASATCER

SEQ ID NO: 743 - protein, 16 aa, Homo sapiens
NIPNGLQEFLDPLCQR

SEQ ID NO: 744 - protein, 10 aa, Homo sapiens
QADIIGKPSR

SEQ ID NO: 745 - protein, 13 aa, Homo sapiens
QEISIMNCLHHPK

SEQ ID NO: 746 - protein, 8 aa, Homo sapiens
QIVSEMLR

SEQ ID NO: 747 - protein, 10 aa, Homo sapiens
RAEQLLQDAR

SEQ ID NO: 748 - protein, 10 aa, Homo sapiens
RFENAPDSAK

SEQ ID NO: 749 - protein, 7 aa, Homo sapiens
SGAPWFK

SEQ ID NO: 750 - protein, 9 aa, Homo sapiens
SIVEHVASK

SEQ ID NO: 751 - protein, 9 aa, Homo sapiens
SLVGLSQER

SEQ ID NO: 752 - protein, 17 aa, Homo sapiens
TVNELQNLSSAEVVVPR

SEQ ID NO: 753 - protein, 7 aa, Homo sapiens
VIAVVNK

SEQ ID NO: 754 - protein, 7 aa, Homo sapiens
VSHSELR

SEQ ID NO: 755 - protein, 14 aa, Homo sapiens
WSDGVGFSYHNFDR

SEQ ID NO: 756 - protein, 15 aa, Homo sapiens
YGADDIELLPEAQHK

SEQ ID NO: 757 - protein, 12 aa, Homo sapiens
AKPEASFQVWNK

SEQ ID NO: 758 - protein, 16 aa, Homo sapiens
ALQLSNSPGASSAFLK

SEQ ID NO: 759 - protein, 31 aa, Homo sapiens
ASSEGGTAAGAGLDSLHKNSVSQISVLSGGK

SEQ ID NO: 760 - protein, 8 aa, Homo sapiens
AVEMAAQR

SEQ ID NO: 761 - protein, 8 aa, Homo sapiens
AVLELLQR

SEQ ID NO: 762 - protein, 11 aa, Homo sapiens
AYAQQLADWAR

SEQ ID NO: 763 - protein, 10 aa, Homo sapiens
DHSAIPVINR

SEQ ID NO: 764 - protein, 9 aa, Homo sapiens
DLRDPAVCR

SEQ ID NO: 765 - protein, 12 aa, Homo sapiens
FGSCVPHTTRPR

SEQ ID NO: 766 - protein, 9 aa, Homo sapiens
GPQYGTLEK

SEQ ID NO: 767 - protein, 10 aa, Homo sapiens
HWDDVVCESR

SEQ ID NO: 768 - protein, 16 aa, Homo sapiens
IVLYQTDASLTPWTVR

SEQ ID NO: 769 - protein, 11 aa, Homo sapiens
KVHSPQQVDFR

SEQ ID NO: 770 - protein, 15 aa, Homo sapiens
LCTDHGSQLVTITNR

SEQ ID NO: 771 - protein, 12 aa, Homo sapiens
LDFLPDMMVEGR

SEQ ID NO: 772 - protein, 17 aa, Homo sapiens
LEAVAEEKPHVKPYFSK

SEQ ID NO: 773 - protein, 26 aa, Homo sapiens
LEVDAIVNAANSSLLGGGGVDGCIHR

SEQ ID NO: 774 - protein, 17 aa, Homo sapiens
LLHEMQIQHPTASLIAK

SEQ ID NO: 775 - protein, 9 aa, Homo sapiens
LLVEELPLR

SEQ ID NO: 776 - protein, 11 aa, Homo sapiens
LMNSQLVTTEK

SEQ ID NO: 777 - protein, 20 aa, Homo sapiens
LSNPPSAGPIVVHCSAGAGR

SEQ ID NO: 778 - protein, 23 aa, Homo sapiens
LSPSSTETTTLPGSPTTPSLSEK

SEQ ID NO: 779 - protein, 23 aa, Homo sapiens
LSPSSTETTTLPGSPTTPSLSEK

SEQ ID NO: 780 - protein, 23 aa, Homo sapiens
LSPSSTETTTLPGSPTTPSLSEK

SEQ ID NO: 781 - protein, 23 aa, Homo sapiens
LSPSSTETTTLPGSPTTPSLSEK

SEQ ID NO: 782 - protein, 8 aa, Homo sapiens
MYLFYGNK

SEQ ID NO: 783 - protein, 9 aa, Homo sapiens
PPLLLILDR

SEQ ID NO: 784 - protein, 14 aa, Homo sapiens
PSLSLGTITDEEMK

SEQ ID NO: 785 - protein, 10 aa, Homo sapiens
QCHECIEHIR

SEQ ID NO: 786 - protein, 11 aa, Homo sapiens
QQNQELQEQLR

SEQ ID NO: 787 - protein, 19 aa, Homo sapiens
SFAPILPHLAEEVFQHIPY

SEQ ID NO: 788 - protein, 15 aa, Homo sapiens
SGLCPHVVVLVATVR

SEQ ID NO: 789 - protein, 16 aa, Homo sapiens
SITILSTPEGTSAACK

SEQ ID NO: 790 - protein, 13 aa, Homo sapiens
SLEGSDDAVLLQR

SEQ ID NO: 791 - protein, 12 aa, Homo sapiens
SMDAETYVEGQR

SEQ ID NO: 792 - protein, 14 aa, Homo sapiens
STTSGLVGESTPSR

SEQ ID NO: 793 - protein, 14 aa, Homo sapiens
STTSGLVGESTPSR

SEQ ID NO: 794 - protein, 14 aa, Homo sapiens
STTSGLVGESTPSR

SEQ ID NO: 795 - protein, 14 aa, Homo sapiens
STTSGLVGESTPSR

SEQ ID NO: 796 - protein, 23 aa, Homo sapiens
TQGSSTSWFGSNQSKPEFTVDLK

SEQ ID NO: 797 - protein, 20 aa, Homo sapiens
VIMIVTDGRPQDSVAEVAAK

SEQ ID NO: 798 - protein, 12 aa, Homo sapiens
VPPPKPATPDFR

SEQ ID NO: 799 - protein, 7 aa, Homo sapiens
WGFCPIK

SEQ ID NO: 800 - protein, 16 aa, Homo sapiens
YAVQVAEGMGYLESKR

SEQ ID NO: 801 - protein, 16 aa, Homo sapiens
AAEEIGIKATHIKLPR

SEQ ID NO: 802 - protein, 13 aa, Homo sapiens
AGDAVNVVVTGGK

SEQ ID NO: 803 - protein, 15 aa, Homo sapiens
AGDTLSGTCLLIANK

SEQ ID NO: 804 - protein, 16 aa, Homo sapiens
AGDTLSGTCLLIANKR

SEQ ID NO: 805 - protein, 8 aa, Homo sapiens
AIDYEIQR

SEQ ID NO: 806 - protein, 8 aa, Homo sapiens
ALEQALEK

SEQ ID NO: 807 - protein, 8 aa, Homo sapiens
ALSSAGER

SEQ ID NO: 808 - protein, 7 aa, Homo sapiens
CFLCDSR

SEQ ID NO: 809 - protein, 10 aa, Homo sapiens
DAEEWVQQLK

SEQ ID NO: 810 - protein, 21 aa, Homo sapiens
DDEFTHLYTLIVRPDNTYEVK

SEQ ID NO: 811 - protein, 11 aa, Homo sapiens
DFGSFDKFKEK

SEQ ID NO: 812 - protein, 14 aa, Homo sapiens
DGDVQAGANLSFNR

SEQ ID NO: 813 - protein, 22 aa, Homo sapiens
EFASHLQQLQDALNELTEEHSK

SEQ ID NO: 814 - protein, 11 aa, Homo sapiens
ETLPELPSVTR

SEQ ID NO: 815 - protein, 21 aa, Homo sapiens
GAPMHDLLLWNNATVTTCHSK

SEQ ID NO: 816 - protein, 7 aa, Homo sapiens
HKSDFGK

SEQ ID NO: 817 - protein, 9 aa, Homo sapiens
IALETSLSK

SEQ ID NO: 818 - protein, 8 aa, Homo sapiens
IGDFGLMR

SEQ ID NO: 819 - protein, 8 aa, Homo sapiens
ILREEGPK

SEQ ID NO: 820 - protein, 9 aa, Homo sapiens
KSEAPFTHK

SEQ ID NO: 821 - protein, 12 aa, Homo sapiens
LCGDLVSCFQER

SEQ ID NO: 822 - protein, 12 aa, Homo sapiens
LLDLLEGLTGQK

SEQ ID NO: 823 - protein, 14 aa, Homo sapiens
LLEQSIQSAQETEK

SEQ ID NO: 824 - protein, 13 aa, Homo sapiens
LQAEDCSIACLPR

SEQ ID NO: 825 - protein, 8 aa, Homo sapiens
MNVVFAVK

SEQ ID NO: 826 - protein, 9 aa, Homo sapiens
NPPAAYIQK

SEQ ID NO: 827 - protein, 11 aa, Homo sapiens
NTSLNPQELQR

SEQ ID NO: 828 - protein, 9 aa, Homo sapiens
NVLINKDIR

SEQ ID NO: 829 - protein, 10 aa, Homo sapiens
PAETLKPMGN

SEQ ID NO: 830 - protein, 10 aa, Homo sapiens
PAETLKPMGN

SEQ ID NO: 831 - protein, 9 aa, Homo sapiens
PFSLDALSK

SEQ ID NO: 832 - protein, 12 aa, Homo sapiens
PLLPANHVTMAK

SEQ ID NO: 833 - protein, 13 aa, Homo sapiens
PSGYTCACDSGFR

SEQ ID NO: 834 - protein, 14 aa, Homo sapiens
PSVVLSAAHTVAAR

SEQ ID NO: 835 - protein, 9 aa, Homo sapiens
QASNGVLIR

SEQ ID NO: 836 - protein, 13 aa, Homo sapiens
QGLELAADCHLSR

SEQ ID NO: 837 - protein, 11 aa, Homo sapiens
QVEELLMAMEK

SEQ ID NO: 838 - protein, 19 aa, Homo sapiens
QVEKEETNEIQVVNEEPQR

SEQ ID NO: 839 - protein, 16 aa, Homo sapiens
RLEAEFPPHHSQSTFR

SEQ ID NO: 840 - protein, 16 aa, Homo sapiens
SWDTNLIECNLDQELK

SEQ ID NO: 841 - protein, 16 aa, Homo sapiens
TGEPCVAELTEENFQR

SEQ ID NO: 842 - protein, 16 aa, Homo sapiens
VECEPSWQPFQGHCYR

SEQ ID NO: 843 - protein, 11 aa, Homo sapiens
VRFTPVVCGLR

SEQ ID NO: 844 - protein, 7 aa, Homo sapiens
VSLSQPR

SEQ ID NO: 845 - protein, 17 aa, Homo sapiens
AAEGYTQFYYVDVLDGK

SEQ ID NO: 846 - protein, 16 aa, Homo sapiens
AALEEVEGDVAELELK

SEQ ID NO: 847 - protein, 13 aa, Homo sapiens
AEEFGNETWGVTK

SEQ ID NO: 848 - protein, 20 aa, Homo sapiens
AFEDWLNDDLGSYQGAQGNR

SEQ ID NO: 849 - protein, 8 aa, Homo sapiens
ATQEWLEK

SEQ ID NO: 850 - protein, 19 aa, Homo sapiens
CSQFCTTGMDGGMSIWDVK

SEQ ID NO: 851 - protein, 20 aa, Homo sapiens
DQLVIPDGQEEEQEAAGEGR

SEQ ID NO: 852 - protein, 13 aa, Homo sapiens
EAQEAEAFALYHK

SEQ ID NO: 853 - protein, 13 aa, Homo sapiens
EGNCSGCIQDCNR

SEQ ID NO: 854 - protein, 22 aa, Homo sapiens
EGQIQSVVTYDLALDSGRPHSR

SEQ ID NO: 855 - protein, 9 aa, Homo sapiens
EIDAALQKK

SEQ ID NO: 856 - protein, 9 aa, Homo sapiens
ERFQNLDKK

SEQ ID NO: 857 - protein, 25 aa, Homo sapiens
ETQPPDLPTTALGGCPSDWIQFLNK

SEQ ID NO: 858 - protein, 20 aa, Homo sapiens
FREFLESQEDYDPCWSLQEK

SEQ ID NO: 859 - protein, 14 aa, Homo sapiens
GGTAAGAGLDSLHK

SEQ ID NO: 860 - protein, 12 aa, Homo sapiens
GLNPGTLNILVR

SEQ ID NO: 861 - protein, 9 aa, Homo sapiens
GQLAPVFQR

SEQ ID NO: 862 - protein, 14 aa, Homo sapiens
GSAASTCILTIESK

SEQ ID NO: 863 - protein, 13 aa, Homo sapiens
ICGVEDAVSEMTR

SEQ ID NO: 864 - protein, 12 aa, Homo sapiens
IITEGFEAAKEK

SEQ ID NO: 865 - protein, 8 aa, Homo sapiens
ILKDIANR

SEQ ID NO: 866 - protein, 19 aa, Homo sapiens
IQDLEHHLGLALNEVQAAK

SEQ ID NO: 867 - protein, 10 aa, Homo sapiens
IVDAVIEQVK

SEQ ID NO: 868 - protein, 7 aa, Homo sapiens
KVNVLQK

SEQ ID NO: 869 - protein, 22 aa, Homo sapiens
LLLQCQVSSDPPATIIWTLNGK

SEQ ID NO: 870 - protein, 8 aa, Homo sapiens
LSFEEMER

SEQ ID NO: 871 - protein, 20 aa, Homo sapiens
LSPIPAVPASVPLQAWHPAK

SEQ ID NO: 872 - protein, 17 aa, Homo sapiens
NQDNEDEWPLAEILSVK

SEQ ID NO: 873 - protein, 11 aa, Homo sapiens
PTTLTDEEINR

SEQ ID NO: 874 - protein, 19 aa, Homo sapiens
QIIEDQSGHYIWVPSPEKL

SEQ ID NO: 875 - protein, 9 aa, Homo sapiens
QIQESEHMK

SEQ ID NO: 876 - protein, 8 aa, Homo sapiens
RDFGSFDK

SEQ ID NO: 877 - protein, 15 aa, Homo sapiens
RPQLEELITAAQNLK

SEQ ID NO: 878 - protein, 8 aa, Homo sapiens
RPYWCISR

SEQ ID NO: 879 - protein, 22 aa, Homo sapiens
SEESTASHSSQDATGTIVLPAR

SEQ ID NO: 880 - protein, 22 aa, Homo sapiens
SEESTASHSSQDATGTIVLPAR

SEQ ID NO: 881 - protein, 22 aa, Homo sapiens
SEESTASHSSQDATGTIVLPAR

SEQ ID NO: 882 - protein, 22 aa, Homo sapiens
SEESTASHSSQDATGTIVLPAR

SEQ ID NO: 883 - protein, 16 aa, Homo sapiens
SGTIFDNFLITNDEAY

SEQ ID NO: 884 - protein, 19 aa, Homo sapiens
SQDADSPGSSGAPENLTFK

SEQ ID NO: 885 - protein, 22 aa, Homo sapiens
TCYPLESRPSLSLGTITDEEMK

SEQ ID NO: 886 - protein, 15 aa, Homo sapiens
TGLFTPDMAFETIVK

SEQ ID NO: 887 - protein, 16 aa, Homo sapiens
VATEAEFSPEDSPSVR

SEQ ID NO: 888 - protein, 9 aa, Homo sapiens
VPPPCDLGR

SEQ ID NO: 889 - protein, 25 aa, Homo sapiens
VVSNFILQALQGEPLTVYGSGSQTR

SEQ ID NO: 890 - protein, 9 aa, Homo sapiens
AAIVFTDGR

SEQ ID NO: 891 - protein, 12 aa, Homo sapiens
AGKGEVTFEDVK

SEQ ID NO: 892 - protein, 7 aa, Homo sapiens
AIDLEIK

SEQ ID NO: 893 - protein, 16 aa, Homo sapiens
AIEEELQEIASEPTNK

SEQ ID NO: 894 - protein, 29 aa, Homo sapiens
ASFITPVPGGVGPMTVAMLMQSTVESAKR

SEQ ID NO: 895 - protein, 11 aa, Homo sapiens
CAVVSSAGSLK

SEQ ID NO: 896 - protein, 7 aa, Homo sapiens
CHYYANK

SEQ ID NO: 897 - protein, 10 aa, Homo sapiens
CLTALPYICK

SEQ ID NO: 898 - protein, 13 aa, Homo sapiens
DEELPTLLHFAAK

SEQ ID NO: 899 - protein, 12 aa, Homo sapiens
DKVMPLIIQGFK

SEQ ID NO: 900 - protein, 10 aa, Homo sapiens
DKVVALAEGR

SEQ ID NO: 901 - protein, 14 aa, Homo sapiens
DQVFGSNLANLCQR

SEQ ID NO: 902 - protein, 10 aa, Homo sapiens
DVFNVEDQKR

SEQ ID NO: 903 - protein, 13 aa, Homo sapiens
EAELEYNPEHVSR

SEQ ID NO: 904 - protein, 11 aa, Homo sapiens
EATDVIIIHSK

SEQ ID NO: 905 - protein, 10 aa, Homo sapiens
EQYDVPQEWR

SEQ ID NO: 906 - protein, 10 aa, Homo sapiens
ESPQDSAITR

SEQ ID NO: 907 - protein, 12 aa, Homo sapiens
EVVLQWFTENSK

SEQ ID NO: 908 - protein, 9 aa, Homo sapiens
EYFTFPASK

SEQ ID NO: 909 - protein, 18 aa, Homo sapiens
FFDSACTMGAYHPLLYEK

SEQ ID NO: 910 - protein, 8 aa, Homo sapiens
FGSFDKFK

SEQ ID NO: 911 - protein, 20 aa, Homo sapiens
FIEAGQFNDNLYGTSIQSVR

SEQ ID NO: 912 - protein, 16 aa, Homo sapiens
FIPGSALNGMVEMMDR

SEQ ID NO: 913 - protein, 12 aa, Homo sapiens
GHLQIAACPNQD

SEQ ID NO: 914 - protein, 20 aa, Homo sapiens
GSWQPVGDLLIDSLQDHLEK

SEQ ID NO: 915 - protein, 8 aa, Homo sapiens
HVVPGVER

SEQ ID NO: 916 - protein, 20 aa, Homo sapiens
IDYGTGHEAAFAAFLCCLCK

SEQ ID NO: 917 - protein, 12 aa, Homo sapiens
IVGNGSEQQLQK

SEQ ID NO: 918 - protein, 21 aa, Homo sapiens
KESEETIIQTDEDVPGPVPVK

SEQ ID NO: 919 - protein, 13 aa, Homo sapiens
LEPAGPACPEGGR

SEQ ID NO: 920 - protein, 12 aa, Homo sapiens
LETLTNQFSDSK

SEQ ID NO: 921 - protein, 8 aa, Homo sapiens
LFSGSQVR

SEQ ID NO: 922 - protein, 6 aa, Homo sapiens
LLEILK

SEQ ID NO: 923 - protein, 11 aa, Homo sapiens
LLQQFPLDLEK

SEQ ID NO: 924 - protein, 23 aa, Homo sapiens
LLTESVNSVIAQAPPVAQEALKK

SEQ ID NO: 925 - protein, 8 aa, Homo sapiens
LPVEDKIR

SEQ ID NO: 926 - protein, 8 aa, Homo sapiens
LPYGGQCR

SEQ ID NO: 927 - protein, 14 aa, Homo sapiens
LSTAITLLPLEEGR

SEQ ID NO: 928 - protein, 26 aa, Homo sapiens
LTASSTCGLNGPQPYCIVSHLQDEKK

SEQ ID NO: 929 - protein, 17 aa, Homo sapiens
LVTPHGESEQIGVIPSK

SEQ ID NO: 930 - protein, 15 aa, Homo sapiens
NAEVRPPFTYASLIR

SEQ ID NO: 931 - protein, 18 aa, Homo sapiens
PAETLKPMGNAKPDENLK

SEQ ID NO: 932 - protein, 17 aa, Homo sapiens
PGGAGPCATVSVFPGAR

SEQ ID NO: 933 - protein, 12 aa, Homo sapiens
QELNTIASKPPR

SEQ ID NO: 934 - protein, 16 aa, Homo sapiens
RFSTEYELQQLEQFKK

SEQ ID NO: 935 - protein, 10 aa, Homo sapiens
RVPPPCAPGR

SEQ ID NO: 936 - protein, 22 aa, Homo sapiens
SCHAGFGSPAGWDVPVGALIQR

SEQ ID NO: 937 - protein, 15 aa, Homo sapiens
SFGHFPGPEFLDVEK

SEQ ID NO: 938 - protein, 10 aa, Homo sapiens
SITEVGEALK

SEQ ID NO: 939 - protein, 25 aa, Homo sapiens
SLQADTTNTDTALTTLEEALAEKER

SEQ ID NO: 940 - protein, 13 aa, Homo sapiens
SSNLLDLKNPFFR

SEQ ID NO: 941 - protein, 16 aa, Homo sapiens
TGYAFVDCPDESWALK

SEQ ID NO: 942 - protein, 14 aa, Homo sapiens
TQVTFFFPLDLSYR

SEQ ID NO: 943 - protein, 16 aa, Homo sapiens
TSKDDLLLTDFEGALK

SEQ ID NO: 944 - protein, 9 aa, Homo sapiens
TVTINTEQK

SEQ ID NO: 945 - protein, 12 aa, Homo sapiens
VADLLQHINLMK

SEQ ID NO: 946 - protein, 17 aa, Homo sapiens
VDANISVHHPGEPLGVR

SEQ ID NO: 947 - protein, 15 aa, Homo sapiens
VMVGDLEDINEMIIK

SEQ ID NO: 948 - protein, 13 aa, Homo sapiens
VVGDVAYDEAKER

SEQ ID NO: 949 - protein, 6 aa, Homo sapiens
VYLLYR

SEQ ID NO: 950 - protein, 15 aa, Homo sapiens
WANGLSEEKPLSVPR

SEQ ID NO: 951 - protein, 7 aa, Homo sapiens
WAPNENK

SEQ ID NO: 952 - protein, 11 aa, Homo sapiens
WCVLSTPEIQK

SEQ ID NO: 953 - protein, 12 aa, Homo sapiens
WMDPEGEMKPGR

SEQ ID NO: 954 - protein, 10 aa, Homo sapiens
WVLLQDILLK

SEQ ID NO: 955 - protein, 9 aa, Homo sapiens
YEEQRPSLK

SEQ ID NO: 956 - protein, 8 aa, Homo sapiens
YGLLNVTK

SEQ ID NO: 957 - protein, 11 aa, Homo sapiens
YQHIGLVAMFR

SEQ ID NO: 958 - protein, 16 aa, Homo sapiens
YVPAIAHLIHSLNPVR

SEQ ID NO: 959 - protein, 12 aa, Homo sapiens
AAILQTEVDALR

SEQ ID NO: 960 - protein, 25 aa, Homo sapiens
ADGGPEAGELPSIGEATAALALAGR

SEQ ID NO: 961 - protein, 7 aa, Homo sapiens
AENYWWR

SEQ ID NO: 962 - protein, 12 aa, Homo sapiens
AEQPPHLTPGIR

SEQ ID NO: 963 - protein, 8 aa, Homo sapiens
AIEALSGK

SEQ ID NO: 964 - protein, 10 aa, Homo sapiens
AIGNIELGIR

SEQ ID NO: 965 - protein, 12 aa, Homo sapiens
AMNNSWHPECFR

SEQ ID NO: 966 - protein, 12 aa, Homo sapiens
APNLSSGNVSLK

SEQ ID NO: 967 - protein, 11 aa, Homo sapiens
AQVAHADQQLR

SEQ ID NO: 968 - protein, 9 aa, Homo sapiens
AREHFGTVK

SEQ ID NO: 969 - protein, 12 aa, Homo sapiens
ARFEQMAKAREE

SEQ ID NO: 970 - protein, 37 aa, Homo sapiens
ASFANEDGQVSPGSLLLAGAIAGMPAASLVTPADVIK

SEQ ID NO: 971 - protein, 14 aa, Homo sapiens
AVVVGFDPHFSYMK

SEQ ID NO: 972 - protein, 13 aa, Homo sapiens
DDLLLTDFEGALK

SEQ ID NO: 973 - protein, 12 aa, Homo sapiens
DNEETGFGSGTR

SEQ ID NO: 974 - protein, 12 aa, Homo sapiens
DVDGLTSINAGK

SEQ ID NO: 975 - protein, 12 aa, Homo sapiens
EAGIQPSLLCVR

SEQ ID NO: 976 - protein, 16 aa, Homo sapiens
EDFNSKHMANQRALGK

SEQ ID NO: 977 - protein, 14 aa, Homo sapiens
EEGDLGPVYGFQWR

SEQ ID NO: 978 - protein, 15 aa, Homo sapiens
EELSSGDSLSPDPWK

SEQ ID NO: 979 - protein, 10 aa, Homo sapiens
ELQKAVEEMK

SEQ ID NO: 980 - protein, 23 aa, Homo sapiens
ENSMLREEMHRRFENAPDSAKTK

SEQ ID NO: 981 - protein, 12 aa, Homo sapiens
EQISDIDDAVRK

SEQ ID NO: 982 - protein, 12 aa, Homo sapiens
EVVDAGLVGLER

SEQ ID NO: 983 - protein, 15 aa, Homo sapiens
FEALQAPACHENMVK

SEQ ID NO: 984 - protein, 9 aa, Homo sapiens
FHLCSVATR

SEQ ID NO: 985 - protein, 16 aa, Homo sapiens
FNLDTENAMTFQENAR

SEQ ID NO: 986 - protein, 8 aa, Homo sapiens
FTEEIPLK

SEQ ID NO: 987 - protein, 16 aa, Homo sapiens
GALTSTPYSPTQHLER

SEQ ID NO: 988 - protein, 20 aa, Homo sapiens
GDEGPIGHQGPIGQEGAPGR

SEQ ID NO: 989 - protein, 17 aa, Homo sapiens
GDSGQPLFLTPYIEAGK

SEQ ID NO: 990 - protein, 20 aa, Homo sapiens
GEPVSAEDLGVSGALTVLMK

SEQ ID NO: 991 - protein, 21 aa, Homo sapiens
GFSGIFPACHPCHACFGDWDR

SEQ ID NO: 992 - protein, 9 aa, Homo sapiens
GIDTPQCHR

SEQ ID NO: 993 - protein, 16 aa, Homo sapiens
GWDSSHEDDLPVYLAR

SEQ ID NO: 994 - protein, 12 aa, Homo sapiens
HEQNIDCGGGYV

SEQ ID NO: 995 - protein, 15 aa, Homo sapiens
HLNQGTDEDIYLLGK

SEQ ID NO: 996 - protein, 7 aa, Homo sapiens
IAELQQR

SEQ ID NO: 997 - protein, 10 aa, Homo sapiens
ILVVITDGEK

SEQ ID NO: 998 - protein, 12 aa, Homo sapiens
INDAFNLASAHK

SEQ ID NO: 999 - protein, 15 aa, Homo sapiens
INLPAPNPDHVGGYK

SEQ ID NO: 1000 - protein, 9 aa, Homo sapiens
IQEILTQVK

SEQ ID NO: 1001 - protein, 13 aa, Homo sapiens
IQPTTPSEPTAIK

SEQ ID NO: 1002 - protein, 32 aa, Homo sapiens
ISPGSTEITTLPGSTTTPGLSEASTTFYSSPR

SEQ ID NO: 1003 - protein, 32 aa, Homo sapiens; identical to SEQ ID NO: 1002

SEQ ID NO: 1004 - protein, 32 aa, Homo sapiens; identical to SEQ ID NO: 1002

SEQ ID NO: 1005 - protein, 32 aa, Homo sapiens; identical to SEQ ID NO: 1002

SEQ ID NO: 1006 - protein, 9 aa, Homo sapiens
ISSMERGLR

SEQ ID NO: 1007 - protein, 22 aa, Homo sapiens
IVLDVGCGSGILSFFAAQAGAR

SEQ ID NO: 1008 - protein, 22 aa, Homo sapiens
IYGADDIELLPEAQHKAEVYTK

SEQ ID NO: 1009 - protein, 7 aa, Homo sapiens
KDVKLDK

SEQ ID NO: 1010 - protein, 11 aa, Homo sapiens
KFQETEQTIQK

SEQ ID NO: 1011 - protein, 14 aa, Homo sapiens
KFSYDLSQCINQMK

SEQ ID NO: 1012 - protein, 17 aa, Homo sapiens
KLPAENGSSSAETLNAK

SEQ ID NO: 1013 - protein, 12 aa, Homo sapiens
KLTELENELNTK

SEQ ID NO: 1014 - protein, 7 aa, Homo sapiens
KQTENPK

SEQ ID NO: 1015 - protein, 11 aa, Homo sapiens
KQVTPLFIHFR

SEQ ID NO: 1016 - protein, 19 aa, Homo sapiens
KRVEDAYILTCNVSLEYEK

SEQ ID NO: 1017 - protein, 13 aa, Homo sapiens
KVPFAWCAPESLK

SEQ ID NO: 1018 - protein, 8 aa, Homo sapiens
LAGAPAPK

SEQ ID NO: 1019 - protein, 15 aa, Homo sapiens
LHELYEKVFSRRADR

SEQ ID NO: 1020 - protein, 15 aa, Homo sapiens
LLDPEDVDTTYPDKK

SEQ ID NO: 1021 - protein, 23 aa, Homo sapiens
LLESLQENHFQEDEQFLGAVMPR

SEQ ID NO: 1022 - protein, 9 aa, Homo sapiens
LLQVAVEDR

SEQ ID NO: 1023 - protein, 22 aa, Homo sapiens
LLVSDIQTIQPSLNSVNEGGQK

SEQ ID NO: 1024 - protein, 10 aa, Homo sapiens
LNLHSADWQR

SEQ ID NO: 1025 - protein, 16 aa, Homo sapiens
LPAENGSSSAETLNAK

SEQ ID NO: 1026 - protein, 10 aa, Homo sapiens
LPLEDADIIK

SEQ ID NO: 1027 - protein, 16 aa, Homo sapiens
LPLQMALTELETLAEK

SEQ ID NO: 1028 - protein, 20 aa, Homo sapiens
LPTEWNVLGTDQSLHDAGPR

SEQ ID NO: 1029 - protein, 14 aa, Homo sapiens
LQEALSQLDFQWEK

SEQ ID NO: 1030 - protein, 24 aa, Homo sapiens
LQEPSAQANCCDSEKNGDIGQQIK

SEQ ID NO: 1031 - protein, 21 aa, Homo sapiens
LQSQVISELDACKECTQGVQR

SEQ ID NO: 1032 - protein, 20 aa, Homo sapiens
LYIGNLSENAAPSDLESIFK

SEQ ID NO: 1033 - protein, 9 aa, Homo sapiens
MLESYLHAK

SEQ ID NO: 1034 - protein, 7 aa, Homo sapiens
NLLLATR

SEQ ID NO: 1035 - protein, 19 aa, Homo sapiens
NVLLHEMQIQHPTASLIAK

SEQ ID NO: 1036 - protein, 9 aa, Homo sapiens
QKPCDLPLR

SEQ ID NO: 1037 - protein, 17 aa, Homo sapiens
QPAAFIVTQYPLPNTVK

SEQ ID NO: 1038 - protein, 12 aa, Homo sapiens
QQLGHIEAWAEK

SEQ ID NO: 1039 - protein, 9 aa, Homo sapiens
QREEHYFCK

SEQ ID NO: 1040 - protein, 12 aa, Homo sapiens
QVFHALEDELQK

SEQ ID NO: 1041 - protein, 16 aa, Homo sapiens
QWMENPNNNPIHPNLR

SEQ ID NO: 1042 - protein, 20 aa, Homo sapiens
SAQALVEQMVNEGVNADSIK

SEQ ID NO: 1043 - protein, 37 aa, Homo sapiens
SATSVLVGEPTTSPISSGSTETTALPGSTTTAGLSEK

SEQ ID NO: 1044 - protein, 37 aa, Homo sapiens; identical to SEQ ID NO: 1043

SEQ ID NO: 1045 - protein, 37 aa, Homo sapiens; identical to SEQ ID NO: 1043

SEQ ID NO: 1046 - protein, 18 aa, Homo sapiens
SAVEGMPSNLDSEVAWGK

SEQ ID NO: 1047 - protein, 17 aa, Homo sapiens
SEDSTIYDLLKDPVSLR

SEQ ID NO: 1048 - protein, 10 aa, Homo sapiens
SLESALKDLK

SEQ ID NO: 1049 - protein, 11 aa, Homo sapiens
SPNPALTFCVK

SEQ ID NO: 1050 - protein, 9 aa, Homo sapiens
STTFYTSPR

SEQ ID NO: 1051 - protein, 9 aa, Homo sapiens
STTFYTSPR

SEQ ID NO: 1052 - protein, 9 aa, Homo sapiens
STTFYTSPR

SEQ ID NO: 1053 - protein, 9 aa, Homo sapiens
STTFYTSPR

SEQ ID NO: 1054 - protein, 8 aa, Homo sapiens
TCHYYANK

SEQ ID NO: 1055 - protein, 25 aa, Homo sapiens
TCSECQELHWGDPGLQCHACDCDSR

SEQ ID NO: 1056 - protein, 8 aa, Homo sapiens
TCYPLESR

SEQ ID NO: 1057 - protein, 10 aa, Homo sapiens
TEFQLELPVK

SEQ ID NO: 1058 - protein, 14 aa, Homo sapiens
TKEPVIMSTLETVR

SEQ ID NO: 1059 - protein, 15 aa, Homo sapiens
TPLWIGLAGEEGSRR

SEQ ID NO: 1060 - protein, 34 aa, Homo sapiens
TQSLNPAPFSPLTAQQMKPEKPSTLQRPQETVIR

SEQ ID NO: 1061 - protein, 16 aa, Homo sapiens
TVGWNVPVGYLVESGR

SEQ ID NO: 1062 - protein, 31 aa, Homo sapiens
VASSSSGNNFLSGSPASPMGDILQTPQFQMR

SEQ ID NO: 1063 - protein, 17 aa, Homo sapiens
VAWVSHDSTVCLADADK

SEQ ID NO: 1064 - protein, 8 aa, Homo sapiens
VEQQPDYR

SEQ ID NO: 1065 - protein, 25 aa, Homo sapiens
VIQEVSGLPSEGASEGNQYTPDAQR

SEQ ID NO: 1066 - protein, 15 aa, Homo sapiens
VLDLLDPASGDLVIR

SEQ ID NO: 1067 - protein, 18 aa, Homo sapiens
VLLHEMQIQHPTASLIAK

SEQ ID NO: 1068 - protein, 11 aa, Homo sapiens
VMDKVTSDETR

SEQ ID NO: 1069 - protein, 9 aa, Homo sapiens
VPRYELLLK

SEQ ID NO: 1070 - protein, 10 aa, Homo sapiens
VQFGASHVFK

SEQ ID NO: 1071 - protein, 9 aa, Homo sapiens
VSCIVSAAK

SEQ ID NO: 1072 - protein, 13 aa, Homo sapiens
VTEILGIEPDREK

SEQ ID NO: 1073 - protein, 11 aa, Homo sapiens
VVDALNQGLPR

SEQ ID NO: 1074 - protein, 19 aa, Homo sapiens
WKTPAAIPATPVAVSQPIR

SEQ ID NO: 1075 - protein, 16 aa, Homo sapiens
YLETADYAIREEIVLK

SEQ ID NO: 1076 - protein, 21 aa, Homo sapiens
YLNWESDQPDNPSEENCGVIR

SEQ ID NO: 1077 - protein, 13 aa, Homo sapiens
YVGFGNTPPPQKK

SEQ ID NO: 1078 - protein, 8 aa, Homo sapiens
AAGNFATK

SEQ ID NO: 1079 - protein, 26 aa, Homo sapiens
AEGERQPPPDSSEEAPPATQNFIIPK

SEQ ID NO: 1080 - protein, 18 aa, Homo sapiens
AGLVVEDALFETLPSDVR

SEQ ID NO: 1081 - protein, 30 aa, Homo sapiens
AHCGDPVSLAAAGDGSPDIGPTGELSGSLK

SEQ ID NO: 1082 - protein, 12 aa, Homo sapiens
AILQNHTDFKDK

SEQ ID NO: 1083 - protein, 27 aa, Homo sapiens
AINVYGTSEPSQESELTTVGEKPEEPK

SEQ ID NO: 1084 - protein, 22 aa, Homo sapiens
ALGEDQVAETSAMSDVLKDILK

SEQ ID NO: 1085 - protein, 18 aa, Homo sapiens
ANIVMVLEIVSGGELFER

SEQ ID NO: 1086 - protein, 22 aa, Homo sapiens
APEEQGLLPNGEPSQHSSAPQK

SEQ ID NO: 1087 - protein, 14 aa, Homo sapiens
APGLGVLSPSGEER

SEQ ID NO: 1088 - protein, 11 aa, Homo sapiens
AQDDVSEWASK

SEQ ID NO: 1089 - protein, 18 aa, Homo sapiens
ASSISEEVAVGSIAATLK

SEQ ID NO: 1090 - protein, 14 aa, Homo sapiens
ATLALDSVLTEEGK

SEQ ID NO: 1091 - protein, 49 aa, Homo sapiens
AVGGDRQEAIQPGCIGGPKGLPGLPGPPGPTGAKGLRGIPGFAGADGGP

SEQ ID NO: 1092 - protein, 11 aa, Homo sapiens
AVGLVSTWTQR

SEQ ID NO: 1093 - protein, 8 aa, Homo sapiens
AVSSADPR

SEQ ID NO: 1094 - protein, 11 aa, Homo sapiens
AWHAFFTAAER

SEQ ID NO: 1095 - protein, 13 aa, Homo sapiens
DCTQCLQHPWLMK

SEQ ID NO: 1096 - protein, 16 aa, Homo sapiens
DEISDDAKDFISNLLK

SEQ ID NO: 1097 - protein, 20 aa, Homo sapiens
DFGPASQHFLSTSVQGPWER

SEQ ID NO: 1098 - protein, 11 aa, Homo sapiens
DFLDSLGFSTR

SEQ ID NO: 1099 - protein, 15 aa, Homo sapiens
DGEWEPPVIQNPEYK

SEQ ID NO: 1100 - protein, 15 aa, Homo sapiens
DTSPAPSGTTSAFVK

SEQ ID NO: 1101 - protein, 13 aa, Homo sapiens
EAEDRARQEEERR

SEQ ID NO: 1102 - protein, 8 aa, Homo sapiens
EAPYGAPR

SEQ ID NO: 1103 - protein, 8 aa, Homo sapiens
ECAIYTNR

SEQ ID NO: 1104 - protein, 8 aa, Homo sapiens
EGIVALRR

SEQ ID NO: 1105 - protein, 11 aa, Homo sapiens
EGPYTVDAIQK

SEQ ID NO: 1106 - protein, 15 aa, Homo sapiens
EKELQTIFDTLPPMR

SEQ ID NO: 1107 - protein, 11 aa, Homo sapiens
ELEQQLQESAR

SEQ ID NO: 1108 - protein, 19 aa, Homo sapiens
EQLDKIQSSHNFQLESVNK

SEQ ID NO: 1109 - protein, 13 aa, Homo sapiens
EVTKEEFVLAAQK

SEQ ID NO: 1110 - protein, 26 aa, Homo sapiens
EVVPGDSVNSLLSILDVITGHQHPQR

SEQ ID NO: 1111 - protein, 15 aa, Homo sapiens
EYWMDPEGEMKPGRK

SEQ ID NO: 1112 - protein, 14 aa, Homo sapiens
FGFSHLEALLDDSK

SEQ ID NO: 1113 - protein, 8 aa, Homo sapiens
FGSQASQK

SEQ ID NO: 1114 - protein, 9 aa, Homo sapiens
FHELTQTDK

SEQ ID NO: 1115 - protein, 12 aa, Homo sapiens
FLDLGISIAENR

SEQ ID NO: 1116 - protein, 8 aa, Homo sapiens
FLLDCGIR

SEQ ID NO: 1117 - protein, 12 aa, Homo sapiens
FVDPSQDHALAK

SEQ ID NO: 1118 - protein, 7 aa, Homo sapiens
FYGDEEK

SEQ ID NO: 1119 - protein, 11 aa, Homo sapiens
GAWLGMNFNPK

SEQ ID NO: 1120 - protein, 8 aa, Homo sapiens
GILVFQLK

SEQ ID NO: 1121 - protein, 12 aa, Homo sapiens
GISLNPEQWSQL

SEQ ID NO: 1122 - protein, 15 aa, Homo sapiens
GLYLPLFKPSVSTSK

SEQ ID NO: 1123 - protein, 11 aa, Homo sapiens
GMEDLIPLVNR

SEQ ID NO: 1124 - protein, 17 aa, Homo sapiens
GPIGHQGPIGQEGAPGR

SEQ ID NO: 1125 - protein, 11 aa, Homo sapiens
GPNKHTLTQIK

SEQ ID NO: 1126 - protein, 14 aa, Homo sapiens
GPTCNEFTGQCHCR

SEQ ID NO: 1127 - protein, 9 aa, Homo sapiens
GSEGEPGIR

SEQ ID NO: 1128 - protein, 14 aa, Homo sapiens
GTDVREPDDSPQGR

SEQ ID NO: 1129 - protein, 11 aa, Homo sapiens
GWAGDSGPQGR

SEQ ID NO: 1130 - protein, 14 aa, Homo sapiens
HAQEELPPPPPQKK

SEQ ID NO: 1131 - protein, 11 aa, Homo sapiens
HSTVLENTDGK

SEQ ID NO: 1132 - protein, 9 aa, Homo sapiens
IEELEEALR

SEQ ID NO: 1133 - protein, 18 aa, Homo sapiens
IEGSGDQIDTYELSGGAR

SEQ ID NO: 1134 - protein, 16 aa, Homo sapiens
IELHGKPIEVEHSVPK

SEQ ID NO: 1135 - protein, 15 aa, Homo sapiens
IIDEDFELTERECIK

SEQ ID NO: 1136 - protein, 10 aa, Homo sapiens
IKLIDFGLAR

SEQ ID NO: 1137 - protein, 11 aa, Homo sapiens
ILDLLNEGSAR

SEQ ID NO: 1138 - protein, 11 aa, Homo sapiens
ILMELDGPNWR

SEQ ID NO: 1139 - protein, 14 aa, Homo sapiens
IPQAVVDVSSHLQK

SEQ ID NO: 1140 - protein, 21 aa, Homo sapiens
IQAEQVDAVTLSGEDIYTAGK

SEQ ID NO: 1141 - protein, 11 aa, Homo sapiens
IVIYVQQTTNK

SEQ ID NO: 1142 - protein, 10 aa, Homo sapiens
IVSEFDYVEK

SEQ ID NO: 1143 - protein, 7 aa, Homo sapiens
KADTLPR

SEQ ID NO: 1144 - protein, 15 aa, Homo sapiens
KINQLSEENGDLSFK

SEQ ID NO: 1145 - protein, 10 aa, Homo sapiens
KIQEILTQVK

SEQ ID NO: 1146 - protein, 18 aa, Homo sapiens
KKLPAENGSSSAETLNAK

SEQ ID NO: 1147 - protein, 23 aa, Homo sapiens
KLLLQCQVSSDPPATIIWTLNGK

SEQ ID NO: 1148 - protein, 21 aa, Homo sapiens
KPAAGLSAAPVPTAPAAGAPL

SEQ ID NO: 1149 - protein, 17 aa, Homo sapiens
KSPSSDSWTCADTSTER

SEQ ID NO: 1150 - protein, 15 aa, Homo sapiens
KSSTGSPTSPLNAEK

SEQ ID NO: 1151 - protein, 7 aa, Homo sapiens
LALLNEK

SEQ ID NO: 1152 - protein, 6 aa, Homo sapiens
LDIDEK

SEQ ID NO: 1153 - protein, 10 aa, Homo sapiens
LIAPLEGYTR

SEQ ID NO: 1154 - protein, 9 aa, Homo sapiens
LKEEEEDKK

SEQ ID NO: 1155 - protein, 18 aa, Homo sapiens
LKNQVTQLKEQVPGFTPR

SEQ ID NO: 1156 - protein, 17 aa, Homo sapiens
LLDPQTNTEIANYPIYK

SEQ ID NO: 1157 - protein, 13 aa, Homo sapiens
LLDRLPSFQQSCR

SEQ ID NO: 1158 - protein, 7 aa, Homo sapiens
LLEAIKR

SEQ ID NO: 1159 - protein, 28 aa, Homo sapiens
LLGFGSALLDNVDPNPENFVGAGIIQTK

SEQ ID NO: 1160 - protein, 23 aa, Homo sapiens
LQAQLNELQAQLSQKEQAAEHYK

SEQ ID NO: 1161 - protein, 11 aa, Homo sapiens
LQDVHVAEGKK

SEQ ID NO: 1162 - protein, 12 aa, Homo sapiens
LQGEVLALEEER

SEQ ID NO: 1163 - protein, 9 aa, Homo sapiens
LSALHLEVR

SEQ ID NO: 1164 - protein, 11 aa, Homo sapiens
LSSQLVEHCQK

SEQ ID NO: 1165 - protein, 10 aa, Homo sapiens
LSVMGCDVLK

SEQ ID NO: 1166 - protein, 22 aa, Homo sapiens
LTAASVGVQGSGWGWLGFNKER

SEQ ID NO: 1167 - protein, 15 aa, Homo sapiens
LTDVAIGAPGEEDNR

SEQ ID NO: 1168 - protein, 9 aa, Homo sapiens
LTHGVLHTK

SEQ ID NO: 1169 - protein, 19 aa, Homo sapiens
LVTDPDSGLCSHYWGAIIR

SEQ ID NO: 1170 - protein, 11 aa, Homo sapiens
MDPEGEMKPGR

SEQ ID NO: 1171 - protein, 6 aa, Homo sapiens
MELLVK

SEQ ID NO: 1172 - protein, 11 aa, Homo sapiens
MVSMMEGVIQK

SEQ ID NO: 1173 - protein, 7 aa, Homo sapiens
MVVASSK

SEQ ID NO: 1174 - protein, 29 aa, Homo sapiens
NDAGQAECSCQVTVDDAPASENTKAPEMK

SEQ ID NO: 1175 - protein, 8 aa, Homo sapiens
NILSEFQR

SEQ ID NO: 1176 - protein, 26 aa, Homo sapiens
NLLEVSEVEQELACQNDHSSALQNIK

SEQ ID NO: 1177 - protein, 12 aa, Homo sapiens
NLVDSYMAIVNK

SEQ ID NO: 1178 - protein, 10 aa, Homo sapiens
NVNVFFPHFK

SEQ ID NO: 1179 - protein, 17 aa, Homo sapiens
PASAEQIQHLAGAIAER

SEQ ID NO: 1180 - protein, 16 aa, Homo sapiens
PAVPASVPLQAWHPAK

SEQ ID NO: 1181 - protein, 14 aa, Homo sapiens
PFSAIYFPCYAHVK

SEQ ID NO: 1182 - protein, 16 aa, Homo sapiens
PGPVPAHSLCGHLVPK

SEQ ID NO: 1183 - protein, 26 aa, Homo sapiens
PLQGTTGLIPLLGIDVWEHAYYLQYK

SEQ ID NO: 1184 - protein, 13 aa, Homo sapiens
PNENKFAVGSGSR

SEQ ID NO: 1185 - protein, 11 aa, Homo sapiens
PPVQFSLLHSK

SEQ ID NO: 1186 - protein, 13 aa, Homo sapiens
QAPIGGDFPAVQK

SEQ ID NO: 1187 - protein, 12 aa, Homo sapiens
QKLQDVHVAEGK

SEQ ID NO: 1188 - protein, 21 aa, Homo sapiens
QLAAYIADKVDAAQMPQEAQK

SEQ ID NO: 1189 - protein, 9 aa, Homo sapiens
QLSESSKLK

SEQ ID NO: 1190 - protein, 11 aa, Homo sapiens
QQTANKVEIEK

SEQ ID NO: 1191 - protein, 15 aa, Homo sapiens
QSSSSRDDNMFQIGK

SEQ ID NO: 1192 - protein, 13 aa, Homo sapiens
QYTYGLVSCGLDR

SEQ ID NO: 1193 - protein, 21 aa, Homo sapiens
RAGNSLAASTAEETAGSAQGR

SEQ ID NO: 1194 - protein, 9 aa, Homo sapiens
REAPYGAPR

SEQ ID NO: 1195 - protein, 19 aa, Homo sapiens
REPAPNAPGDIAAAFPAER

SEQ ID NO: 1196 - protein, 17 aa, Homo sapiens
RGWDSSHEDDLPVYLAR

SEQ ID NO: 1197 - protein, 10 aa, Homo sapiens
RLEEESAQLK

SEQ ID NO: 1198 - protein, 20 aa, Homo sapiens
RQVEKEETNEIQVVNEEPQR

SEQ ID NO: 1199 - protein, 12 aa, Homo sapiens
RSESQGTAPAFK

SEQ ID NO: 1200 - protein, 13 aa, Homo sapiens
SCTEETHGFICQK

SEQ ID NO: 1201 - protein, 12 aa, Homo sapiens
SDFGKFVLSSGK

SEQ ID NO: 1202 - protein, 9 aa, Homo sapiens
SEYMEGNVR

SEQ ID NO: 1203 - protein, 21 aa, Homo sapiens
SFAPILPHLAEEVFQHIPYIK

SEQ ID NO: 1204 - protein, 14 aa, Homo sapiens
SKVPQETQSGGGSR

SEQ ID NO: 1205 - protein, 26 aa, Homo sapiens
SPATTLSPASTTSSGVSEESTTSHSR

SEQ ID NO: 1206 - protein, 26 aa, Homo sapiens
SPATTLSPASTTSSGVSEESTTSHSR

SEQ ID NO: 1207 - protein, 46 aa, Homo sapiens
SPATTLSPASTTSSGVSEESTTSHSRPGSTHTTAFPDSTTTPGLSR

SEQ ID NO: 1208 - protein, 46 aa, Homo sapiens; identical to SEQ ID NO: 1207

SEQ ID NO: 1209 - protein, 16 aa, Homo sapiens
SQDLQVIDLLTVGESR

SEQ ID NO: 1210 - protein, 32 aa, Homo sapiens
SREPQAKPQLDLSIDSLDLSCEEGTPLSITSK

SEQ ID NO: 1211 - protein, 22 aa, Homo sapiens
SRQELASGLPSPAATQELPVER

SEQ ID NO: 1212 - protein, 10 aa, Homo sapiens
SSAAAGAPSR

SEQ ID NO: 1213 - protein, 15 aa, Homo sapiens
SSPNVANQPPSPGGK

SEQ ID NO: 1214 - protein, 16 aa, Homo sapiens
SSSEVLVLAETLDGVR

SEQ ID NO: 1215 - protein, 17 aa, Homo sapiens
SVQEIAEQLLLENHPAR

SEQ ID NO: 1216 - protein, 9 aa, Homo sapiens
TCTGYHQVR

SEQ ID NO: 1217 - protein, 6 aa, Homo sapiens
TGETSR

SEQ ID NO: 1218 - protein, 7 aa, Homo sapiens
TIQNQLR

SEQ ID NO: 1219 - protein, 13 aa, Homo sapiens
TLFSLMQYSEEFR

SEQ ID NO: 1220 - protein, 8 aa, Homo sapiens
TPAPDGPR

SEQ ID NO: 1221 - protein, 9 aa, Homo sapiens
TPGQIVSEK

SEQ ID NO: 1222 - protein, 6 aa, Homo sapiens
TPVPEK

SEQ ID NO: 1223 - protein, 10 aa, Homo sapiens
TTLLDPDSCR

SEQ ID NO: 1224 - protein, 9 aa, Homo sapiens
TTTESEVMK

SEQ ID NO: 1225 - protein, 18 aa, Homo sapiens
TVLQIDCGLQLANDSVNR

SEQ ID NO: 1226 - protein, 26 aa, Homo sapiens
VAQQPLSLVGCEVVPDPSPDHLYSFR

SEQ ID NO: 1227 - protein, 9 aa, Homo sapiens
VHALNNVNK

SEQ ID NO: 1228 - protein, 8 aa, Homo sapiens
VIVMPTTK

SEQ ID NO: 1229 - protein, 12 aa, Homo sapiens
VLQEDLEQEQVR

SEQ ID NO: 1230 - protein, 9 aa, Homo sapiens
VPAHAVVVR

SEQ ID NO: 1231 - protein, 8 aa, Homo sapiens
WLNEVEFK

SEQ ID NO: 1232 - protein, 16 aa, Homo sapiens
WTDGSIINFISWAPGK

SEQ ID NO: 1233 - protein, 18 aa, Homo sapiens
WTDGSIINFISWAPGKPR

SEQ ID NO: 1234 - protein, 8 aa, Homo sapiens
WVNAQFSK

SEQ ID NO: 1235 - protein, 15 aa, Homo sapiens
YDNFGVLGLDLWQVK

SEQ ID NO: 1236 - protein, 14 aa, Homo sapiens
YLLYRPGHYDILYK

SEQ ID NO: 1237 - protein, 12 aa, Homo sapiens
YLSSLDLLLEHR

SEQ ID NO: 1238 - protein, 30 aa, Homo sapiens
YLVHCLQSELNNYMPAFLDDPEENSLQRPK

SEQ ID NO: 1239 - protein, 21 aa, Homo sapiens
YRDPGVLPWGALEEEEEDGGR

SEQ ID NO: 1240 - protein, 34 aa, Homo sapiens
AAAAAVGPGAGGAGSAVPGGAGPCATVSVFPGAR

SEQ ID NO: 1241 - protein, 17 aa, Homo sapiens
AAAKVALTKRADPAELR

SEQ ID NO: 1242 - protein, 15 aa, Homo sapiens
AAATEEPEVIPDPAK

SEQ ID NO: 1243 - protein, 9 aa, Homo sapiens
AAEEPQQQK

SEQ ID NO: 1244 - protein, 24 aa, Homo sapiens
AAGDGSPDIGPTGELSGSLKIPNR

SEQ ID NO: 1245 - protein, 12 aa, Homo sapiens
AAGLQAEIGQVK

SEQ ID NO: 1246 - protein, 7 aa, Homo sapiens
AASGVPR

SEQ ID NO: 1247 - protein, 26 aa, Homo sapiens
ACGNMFGLMHGTCPETSGGLLICLPR

SEQ ID NO: 1248 - protein, 11 aa, Homo sapiens
ADSAVSQEQLR

SEQ ID NO: 1249 - protein, 13 aa, Homo sapiens
AEEKPHVKPYFSK

SEQ ID NO: 1250 - protein, 12 aa, Homo sapiens
AELEYNPEHVSR

SEQ ID NO: 1251 - protein, 9 aa, Homo sapiens
AEQLLQDAR

SEQ ID NO: 1252 - protein, 20 aa, Homo sapiens
AEYMRIQAQQQATKPSKEMS

SEQ ID NO: 1253 - protein, 12 aa, Homo sapiens
AFCGLGTTGMWR

SEQ ID NO: 1254 - protein, 19 aa, Homo sapiens
AFLEAVAEEKPHVKPYFSK

SEQ ID NO: 1255 - protein, 11 aa, Homo sapiens
AHKQCALKLLR

SEQ ID NO: 1256 - protein, 10 aa, Homo sapiens
ALMDLLQLTR

SEQ ID NO: 1257 - protein, 10 aa, Homo sapiens
ALQDFEEPDK

SEQ ID NO: 1258 - protein, 12 aa, Homo sapiens
ALQFLEEVKVSR

SEQ ID NO: 1259 - protein, 32 aa, Homo sapiens
ALQHMAAMSSAQIVSATAIHNKLGLPGIPRPT

SEQ ID NO: 1260 - protein, 12 aa, Homo sapiens
AMAYETLEQYGK

SEQ ID NO: 1261 - protein, 23 aa, Homo sapiens
AMLAAVLEQELPALAENLHQEQK

SEQ ID NO: 1262 - protein, 23 aa, Homo sapiens
AMLAAVLEQELPALAENLHQEQK

SEQ ID NO: 1263 - protein, 29 aa, Homo sapiens
ANGITMYAVGVGKAIEEELQEIASEPTNK

SEQ ID NO: 1264 - protein, 11 aa, Homo sapiens
APAPDVPGCSR

SEQ ID NO: 1265 - protein, 19 aa, Homo sapiens
APILPHLAEEVFQHIPYIK

SEQ ID NO: 1266 - protein, 21 aa, Homo sapiens
AQALLADVDTLLFDCDGVLWR

SEQ ID NO: 1267 - protein, 14 aa, Homo sapiens
AQNSGFDLQETLVK

SEQ ID NO: 1268 - protein, 8 aa, Homo sapiens
ARFEQMAK

SEQ ID NO: 1269 - protein, 19 aa, Homo sapiens
ARPEAYQVPASYQPDEEER

SEQ ID NO: 1270 - protein, 22 aa, Homo sapiens
ARTSAGVGAWGAAAVGRTAGVR

SEQ ID NO: 1271 - protein, 17 aa, Homo sapiens
ASIPLKELEQFNSDIQK

SEQ ID NO: 1272 - protein, 14 aa, Homo sapiens
ATSCFPRPMTPRDR

SEQ ID NO: 1273 - protein, 13 aa, Homo sapiens
AVTSVSGPGEHLR

SEQ ID NO: 1274 - protein, 8 aa, Homo sapiens
CAEVVSGK

SEQ ID NO: 1275 - protein, 10 aa, Homo sapiens
CFGLLLSPGK

SEQ ID NO: 1276 - protein, 14 aa, Homo sapiens
CGDSDKGFVVINQK

SEQ ID NO: 1277 - protein, 19 aa, Homo sapiens
CGGLSCNGAAATADLALGR

SEQ ID NO: 1278 - protein, 10 aa, Homo sapiens
CLCPPDFAGK

SEQ ID NO: 1279 - protein, 9 aa, Homo sapiens
CLQHPWLMK

SEQ ID NO: 1280 - protein, 13 aa, Homo sapiens
CLVENAGDVAFVR

SEQ ID NO: 1281 - protein, 22 aa, Homo sapiens
CSGNIDPMDPDACDPHTGQCLR

SEQ ID NO: 1282 - protein, 16 aa, Homo sapiens
CTEGPIDLVFVIDGSK

SEQ ID NO: 1283 - protein, 12 aa, Homo sapiens
CTQCLQHPWLMK

SEQ ID NO: 1284 - protein, 10 aa, Homo sapiens
CVRWAPNENK

SEQ ID NO: 1285 - protein, 8 aa, Homo sapiens
DALLEALK

SEQ ID NO: 1286 - protein, 12 aa, Homo sapiens
DCCFEISAPDKR

SEQ ID NO: 1287 - protein, 21 aa, Homo sapiens
DDRTGTGTLSVFGMQARYSLR

SEQ ID NO: 1288 - protein, 13 aa, Homo sapiens
DEDFELTERECIK

SEQ ID NO: 1289 - protein, 12 aa, Homo sapiens
DISLQGPGLAPE

SEQ ID NO: 1290 - protein, 10 aa, Homo sapiens
DITAALAAER

SEQ ID NO: 1291 - protein, 10 aa, Homo sapiens
DLNVISSLLK

SEQ ID NO: 1292 - protein, 16 aa, Homo sapiens
DQREPLPPAPAENEMK

SEQ ID NO: 1293 - protein, 20 aa, Homo sapiens
DQSPLVSSSDSPPRPQPAFK

SEQ ID NO: 1294 - protein, 9 aa, Homo sapiens
DRRGSGKPR

SEQ ID NO: 1295 - protein, 12 aa, Homo sapiens
DSSHAFTLDELR

SEQ ID NO: 1296 - protein, 22 aa, Homo sapiens
DWDSPYSHDLDTSADSVGNACR

SEQ ID NO: 1297 - protein, 18 aa, Homo sapiens
EAEQLLRGPLGDQYQTVK

SEQ ID NO: 1298 - protein, 15 aa, Homo sapiens
EAEVQTWLQQIGFSK

SEQ ID NO: 1299 - protein, 8 aa, Homo sapiens
EDTVQSVK

SEQ ID NO: 1300 - protein, 11 aa, Homo sapiens
EEAEQVLGQAR

SEQ ID NO: 1301 - protein, 7 aa, Homo sapiens
EGIVALR

SEQ ID NO: 1302 - protein, 11 aa, Homo sapiens
EGTEAEPLPLR

SEQ ID NO: 1303 - protein, 11 aa, Homo sapiens
EGTEAEPLPLR

SEQ ID NO: 1304 - protein, 9 aa, Homo sapiens
EGTPGIFQK

SEQ ID NO: 1305 - protein, 8 aa, Homo sapiens
EGVIQNFK

SEQ ID NO: 1306 - protein, 8 aa, Homo sapiens
EIDAALQK

SEQ ID NO: 1307 - protein, 13 aa, Homo sapiens
EIHTVPDMGKWKR

SEQ ID NO: 1308 - protein, 22 aa, Homo sapiens
EKLTAASVGVQGSGWGWLGFNK

SEQ ID NO: 1309 - protein, 23 aa, Homo sapiens
ELEAKMLAQKAEEKENHCPTMLR

SEQ ID NO: 1310 - protein, 19 aa, Homo sapiens
ELEEKDGDVQAGANLSFNR

SEQ ID NO: 1311 - protein, 15 aa, Homo sapiens
ELETLTTNYQWLCTR

SEQ ID NO: 1312 - protein, 26 aa, Homo sapiens
ELLLSGPPEVAAPDTPYLHVDSAAQR

SEQ ID NO: 1313 - protein, 9 aa, Homo sapiens
ELQDGIGQR

SEQ ID NO: 1314 - protein, 13 aa, Homo sapiens
EMSKKAPSEISRK

SEQ ID NO: 1315 - protein, 17 aa, Homo sapiens
ENIRQEISIMNCLHHPK

SEQ ID NO: 1316 - protein, 22 aa, Homo sapiens
EPMKAPLCGEGDQPGGFESQEK

SEQ ID NO: 1317 - protein, 18 aa, Homo sapiens
EPYAREMLAISFISAVNR

SEQ ID NO: 1318 - protein, 25 aa, Homo sapiens
ERARKFSGSGLAMGLGSASASAWRR

SEQ ID NO: 1319 - protein, 25 aa, Homo sapiens
ERARKFSGSGLAMGLGSASASAWRR

SEQ ID NO: 1320 - protein, 19 aa, Homo sapiens
ERVLSLSQALATEASQWHR

SEQ ID NO: 1321 - protein, 30 aa, Homo sapiens
ESGRGSSTPPGPIAALGMPDTGPGSSSLGK

SEQ ID NO: 1322 - protein, 16 aa, Homo sapiens
ESGSLEDDWDFLPPKK

SEQ ID NO: 1323 - protein, 15 aa, Homo sapiens
EVARNVFECNDQVVK

SEQ ID NO: 1324 - protein, 12 aa, Homo sapiens
EVPEEGPGAPAR

SEQ ID NO: 1325 - protein, 9 aa, Homo sapiens
EYQEDLALR

SEQ ID NO: 1326 - protein, 7 aa, Homo sapiens
FAGDSLK

SEQ ID NO: 1327 - protein, 8 aa, Homo sapiens
FGPGDQVR

SEQ ID NO: 1328 - protein, 12 aa, Homo sapiens
FGVLGLDLWQVK

SEQ ID NO: 1329 - protein, 13 aa, Homo sapiens
FKDNPTVVVEDLR

SEQ ID NO: 1330 - protein, 16 aa, Homo sapiens
FNGAPTANFQQDVGTK

SEQ ID NO: 1331 - protein, 11 aa, Homo sapiens
FNHPAEAKWMK

SEQ ID NO: 1332 - protein, 14 aa, Homo sapiens
FNRALNCMNLPPDK

SEQ ID NO: 1333 - protein, 9 aa, Homo sapiens
FRLAEDGKR

SEQ ID NO: 1334 - protein, 7 aa, Homo sapiens
FSAEALR

SEQ ID NO: 1335 - protein, 9 aa, Homo sapiens
FSPEVPGQK

SEQ ID NO: 1336 - protein, 8 aa, Homo sapiens
FTDFEEVR

SEQ ID NO: 1337 - protein, 14 aa, Homo sapiens
FVPIIGIAMPLSSR

SEQ ID NO: 1338 - protein, 11 aa, Homo sapiens
FWPAIDDGLRR

SEQ ID NO: 1339 - protein, 19 aa, Homo sapiens
FWVVDQTHFYLGSANMDWR

SEQ ID NO: 1340 - protein, 19 aa, Homo sapiens
GAAVDEYFRQPVVDTFDIR

SEQ ID NO: 1341 - protein, 12 aa, Homo sapiens
GAFHRPVLGGFR

SEQ ID NO: 1342 - protein, 17 aa, Homo sapiens
GAGLAWGVHDCQLCSER

SEQ ID NO: 1343 - protein, 19 aa, Homo sapiens
GAPISAYQIVVEELHPHRT

SEQ ID NO: 1344 - protein, 27 aa, Homo sapiens
GATGHPGGGQGAENPAGLKSQGNELFR

SEQ ID NO: 1345 - protein, 16 aa, Homo sapiens
GCLELIKETGVPIAGR

SEQ ID NO: 1346 - protein, 25 aa, Homo sapiens
GCPQEDSDIAFLIDGSGSIIPHDFR

SEQ ID NO: 1347 - protein, 32 aa, Homo sapiens
GDEGPIGHQGPIGQEGAPGRPGSPGLPGMPGR

SEQ ID NO: 1348 - protein, 15 aa, Homo sapiens
GDKGERGAPGVTGPK

SEQ ID NO: 1349 - protein, 14 aa, Homo sapiens
GDNVLINTFSGLLK

SEQ ID NO: 1350 - protein, 14 aa, Homo sapiens
GDNVLINTFSGLLK

SEQ ID NO: 1351 - protein, 27 aa, Homo sapiens
GDTGNPGAPGTPGTKGWAGDSGPQGRP

SEQ ID NO: 1352 - protein, 11 aa, Homo sapiens
GEFAIDGYSVR

SEQ ID NO: 1353 - protein, 16 aa, Homo sapiens
GEGLYADPYGLLHEGR

SEQ ID NO: 1354 - protein, 18 aa, Homo sapiens
GEIAPLKENVSHVNDLAR

SEQ ID NO: 1355 - protein, 14 aa, Homo sapiens
GEWKPRQIDNPDYK

SEQ ID NO: 1356 - protein, 18 aa, Homo sapiens
GGCVALATGSAMGLWEVK

SEQ ID NO: 1357 - protein, 14 aa, Homo sapiens
GGHDIILAAFDNFK

SEQ ID NO: 1358 - protein, 25 aa, Homo sapiens
GGSQPPDIDKTELVEPTEYLVVHLK

SEQ ID NO: 1359 - protein, 10 aa, Homo sapiens
GGVSAVPGFR

SEQ ID NO: 1360 - protein, 33 aa, Homo sapiens
GHLQIAACPNQDPLQGTTGLIPLLGIDVWEHAY

SEQ ID NO: 1361 - protein, 21 aa, Homo sapiens
GHPDRLPLQMALTELETLAEK

SEQ ID NO: 1362 - protein, 8 aa, Homo sapiens
GKEAGEVR

SEQ ID NO: 1363 - protein, 11 aa, Homo sapiens
GKNVLINKDIR

SEQ ID NO: 1364 - protein, 11 aa, Homo sapiens
GLCFLFGSNLR

SEQ ID NO: 1365 - protein, 13 aa, Homo sapiens
GLEEAVESACAMR

SEQ ID NO: 1366 - protein, 19 aa, Homo sapiens
GLGKYICQKCHAIIDEQPL

SEQ ID NO: 1367 - protein, 33 aa, Homo sapiens
GNCFCYGHASECAPAPGAPAHAEGMVHGACICK

SEQ ID NO: 1368 - protein, 31 aa, Homo sapiens
GPAPARPKMLVISGGDGYEDFRLSSGGGSSS

SEQ ID NO: 1369 - protein, 13 aa, Homo sapiens
GPGAGSALDDGRR

SEQ ID NO: 1370 - protein, 8 aa, Homo sapiens
GPPSSVPK

SEQ ID NO: 1371 - protein, 12 aa, Homo sapiens
GQLQDELEKGER

SEQ ID NO: 1372 - protein, 32 aa, Homo sapiens
GQTPEAGADKRSPRRASAAAAAGGGATGHPGG

SEQ ID NO: 1373 - protein, 24 aa, Homo sapiens
GREPASCEDLCGGGVGADGGGSDR

SEQ ID NO: 1374 - protein, 21 aa, Homo sapiens
GRISVSLQEEASGGSLAAPAR

SEQ ID NO: 1375 - protein, 16 aa, Homo sapiens
GSDGMDAVRSAPTLIR

SEQ ID NO: 1376 - protein, 12 aa, Homo sapiens
GSRPGIEGDTPR

SEQ ID NO: 1377 - protein, 11 aa, Homo sapiens
GTISFFEIDGR

SEQ ID NO: 1378 - protein, 16 aa, Homo sapiens
GTWIHPEIDNPEYSPD

SEQ ID NO: 1379 - protein, 10 aa, Homo sapiens
GVTDTLAQIR

SEQ ID NO: 1380 - protein, 12 aa, Homo sapiens
GWDCHGLPIEIK

SEQ ID NO: 1381 - protein, 11 aa, Homo sapiens
HCELCRPFFYR

SEQ ID NO: 1382 - protein, 26 aa, Homo sapiens
HFQIDYDEDGNCSLIISDVCGDDDAK

SEQ ID NO: 1383 - protein, 25 aa, Homo sapiens
HGGLSLVQTTDYIYPIVDDPYMMGR

SEQ ID NO: 1384 - protein, 11 aa, Homo sapiens
HLDTLHNFVSR

SEQ ID NO: 1385 - protein, 10 aa, Homo sapiens
HLNPGLQLYR

SEQ ID NO: 1386 - protein, 19 aa, Homo sapiens
HTEILEILEIPQLMDTCVR

SEQ ID NO: 1387 - protein, 11 aa, Homo sapiens
HTLTQIKDAVR

SEQ ID NO: 1388 - protein, 19 aa, Homo sapiens
IAALNASSTIEDDHEGSFK

SEQ ID NO: 1389 - protein, 7 aa, Homo sapiens
IAEIQAR

SEQ ID NO: 1390 - protein, 14 aa, Homo sapiens
IDALREELMEGMDR

SEQ ID NO: 1391 - protein, 10 aa, Homo sapiens
IFEEQPCLRK

SEQ ID NO: 1392 - protein, 13 aa, Homo sapiens
IFLTEQPLEGLEK

SEQ ID NO: 1393 - protein, 7 aa, Homo sapiens
IFSAYIK

SEQ ID NO: 1394 - protein, 16 aa, Homo sapiens
IIDRIHGTEEGQQILK

SEQ ID NO: 1395 - protein, 10 aa, Homo sapiens
ILHKGEELAK

SEQ ID NO: 1396 - protein, 20 aa, Homo sapiens
INELENGGEILNETRSFHHK

SEQ ID NO: 1397 - protein, 18 aa, Homo sapiens
IPASAEQIQHLAGAIAER

SEQ ID NO: 1398 - protein, 8 aa, Homo sapiens
IQGTLQPH

SEQ ID NO: 1399 - protein, 15 aa, Homo sapiens
IQNQWDEVQEHLQNR

SEQ ID NO: 1400 - protein, 25 aa, Homo sapiens
IQNVVTSFAPQRRAAWWQSENGIPA

SEQ ID NO: 1401 - protein, 12 aa, Homo sapiens
IRQKVDDCERCR

SEQ ID NO: 1402 - protein, 8 aa, Homo sapiens
ITEQEKLK

SEQ ID NO: 1403 - protein, 32 aa, Homo sapiens
ITSVSTGNLCTEEQTPPPRPEAYPIPTQTYTR

SEQ ID NO: 1404 - protein, 12 aa, Homo sapiens
IVLGGTTVHNTK

SEQ ID NO: 1405 - protein, 7 aa, Homo sapiens
IVTTHIR

SEQ ID NO: 1406 - protein, 14 aa, Homo sapiens
KDAEGILEDLQSYR

SEQ ID NO: 1407 - protein, 16 aa, Homo sapiens
KDVEVTKEEFVLAAQK

SEQ ID NO: 1408 - protein, 8 aa, Homo sapiens
KEADMQQK

SEQ ID NO: 1409 - protein, 14 aa, Homo sapiens
KHPSSPECLVSAQK

SEQ ID NO: 1410 - protein, 10 aa, Homo sapiens
KIQNHIQTLK

SEQ ID NO: 1411 - protein, 13 aa, Homo sapiens
KISEESGETAKRR

SEQ ID NO: 1412 - protein, 19 aa, Homo sapiens
KIYAVEASTMAQHAEVLVK

SEQ ID NO: 1413 - protein, 9 aa, Homo sapiens
KKEELNAVR

SEQ ID NO: 1414 - protein, 14 aa, Homo sapiens
KKGPGAGSALDDGR

SEQ ID NO: 1415 - protein, 6 aa, Homo sapiens
KLMQIR

SEQ ID NO: 1416 - protein, 12 aa, Homo sapiens
KLSSQLVEHCQK

SEQ ID NO: 1417 - protein, 7 aa, Homo sapiens
KLTFEYR

SEQ ID NO: 1418 - protein, 16 aa, Homo sapiens
KMEEEPLGPDLEDLKR

SEQ ID NO: 1419 - protein, 8 aa, Homo sapiens
KMSGTVSK

SEQ ID NO: 1420 - protein, 11 aa, Homo sapiens
KQVAPEKPVKK

SEQ ID NO: 1421 - protein, 26 aa, Homo sapiens
KSSTGSPTSPLNAEKLESEEDVSQAF

SEQ ID NO: 1422 - protein, 11 aa, Homo sapiens
KTRPDGNCFYR

SEQ ID NO: 1423 - protein, 9 aa, Homo sapiens
KVSTLQNQR

SEQ ID NO: 1424 - protein, 9 aa, Homo sapiens
LAGEEEALR

SEQ ID NO: 1425 - protein, 15 aa, Homo sapiens
LCDNIVSESESTTAR

SEQ ID NO: 1426 - protein, 18 aa, Homo sapiens
LCIEHVEEHGLDIDGIYR

SEQ ID NO: 1427 - protein, 23 aa, Homo sapiens
LCQFEEAKQDCDQALQLADGNVK

SEQ ID NO: 1428 - protein, 21 aa, Homo sapiens
LDAWEEAQVEFMASHGNDAAR

SEQ ID NO: 1429 - protein, 13 aa, Homo sapiens
LDEDLTTLGQMSK

SEQ ID NO: 1430 - protein, 20 aa, Homo sapiens
LDLFEISQPTEDLEFHGVMR

SEQ ID NO: 1431 - protein, 6 aa, Homo sapiens
LEAIKR

SEQ ID NO: 1432 - protein, 10 aa, Homo sapiens
LEMLQQIANR

SEQ ID NO: 1433 - protein, 23 aa, Homo sapiens
LESEEDVSQAFLEAVAEEKPHVK

SEQ ID NO: 1434 - protein, 25 aa, Homo sapiens
LESEEDVSQAFLEAVAEEKPHVKPY

SEQ ID NO: 1435 - protein, 16 aa, Homo sapiens
LETMARNEVIADINCK

SEQ ID NO: 1436 - protein, 19 aa, Homo sapiens
LEYNVDAANGIVMEGYLFK

SEQ ID NO: 1437 - protein, 32 aa, Homo sapiens
LFPNSLDQTDMHGDSEYNIMFGPDICGPGTKK

SEQ ID NO: 1438 - protein, 8 aa, Homo sapiens
LGCTMSMR

SEQ ID NO: 1439 - protein, 18 aa, Homo sapiens
LGIEKTDPTTLTDEEINR

SEQ ID NO: 1440 - protein, 14 aa, Homo sapiens
LGIVNVDEAVLHFK

SEQ ID NO: 1441 - protein, 16 aa, Homo sapiens
LGYTPLIVACHYGNVK

SEQ ID NO: 1442 - protein, 16 aa, Homo sapiens
LHEMQIQHPTASLIAK

SEQ ID NO: 1443 - protein, 9 aa, Homo sapiens
LHYNELGAK

SEQ ID NO: 1444 - protein, 17 aa, Homo sapiens
LKAVQAQGGESQQEAQR

SEQ ID NO: 1445 - protein, 17 aa, Homo sapiens
LKEDMKKIVAVPLNEQK

SEQ ID NO: 1446 - protein, 10 aa, Homo sapiens
LKEEEEDKKR

SEQ ID NO: 1447 - protein, 10 aa, Homo sapiens
LKELNDWLTK

SEQ ID NO: 1448 - protein, 10 aa, Homo sapiens
LKLSFEEMER

SEQ ID NO: 1449 - protein, 10 aa, Homo sapiens
LKLTFEELER

SEQ ID NO: 1450 - protein, 11 aa, Homo sapiens
LKPEIQCVSAK

SEQ ID NO: 1451 - protein, 14 aa, Homo sapiens
LLEATPTDSCGYFR

SEQ ID NO: 1452 - protein, 14 aa, Homo sapiens
LLEATPTDSCGYFR

SEQ ID NO: 1453 - protein, 10 aa, Homo sapiens
LLKGESALQR

SEQ ID NO: 1454 - protein, 7 aa, Homo sapiens
LLNEGQR

SEQ ID NO: 1455 - protein, 12 aa, Homo sapiens
LNGFQLENFTLK

SEQ ID NO: 1456 - protein, 6 aa, Homo sapiens
LNKILK

SEQ ID NO: 1457 - protein, 12 aa, Homo sapiens
LNREVAESPRPR

SEQ ID NO: 1458 - protein, 32 aa, Homo sapiens
LPPSSPQKLADVAAPPGGPPPPHSPYSGPPSR

SEQ ID NO: 1459 - protein, 29 aa, Homo sapiens
LQDAFSAIGQNADLDLPQIAVVGGQSAGK

SEQ ID NO: 1460 - protein, 18 aa, Homo sapiens
LQELEGTYEENERALESK

SEQ ID NO: 1461 - protein, 22 aa, Homo sapiens
LQQQCDDYGSSYLGVIELIGEK

SEQ ID NO: 1462 - protein, 37 aa, Homo sapiens
LSAHTHTLSLTDINELVCGAPGDAPCATSPCGGAGCR

SEQ ID NO: 1463 - protein, 11 aa, Homo sapiens
LSFEEMERQRR

SEQ ID NO: 1464 - protein, 13 aa, Homo sapiens
LSGWLAQQEDAHR

SEQ ID NO: 1465 - protein, 14 aa, Homo sapiens
LSHFEYVKNEDLEK

SEQ ID NO: 1466 - protein, 14 aa, Homo sapiens
LSIPQLSVTDYEIM

SEQ ID NO: 1467 - protein, 17 aa, Homo sapiens
LSIPQLSVTDYEIMEQR

SEQ ID NO: 1468 - protein, 23 aa, Homo sapiens
LSPAYSLGSLTGASPCQSPCVQR

SEQ ID NO: 1469 - protein, 14 aa, Homo sapiens
LSSGGGSSSETVGR

SEQ ID NO: 1470 - protein, 21 aa, Homo sapiens
LTEEQCLFSAWLSEKEDAVNK

SEQ ID NO: 1471 - protein, 15 aa, Homo sapiens
LVAAGGLDAVLYWCR

SEQ ID NO: 1472 - protein, 12 aa, Homo sapiens
LVEFSAFLEQQR

SEQ ID NO: 1473 - protein, 9 aa, Homo sapiens
LVPSVNGVR

SEQ ID NO: 1474 - protein, 18 aa, Homo sapiens
LVTPHGESEQIGVIPSKK

SEQ ID NO: 1475 - protein, 31 aa, Homo sapiens
LVVTQEDVELAYQEAMMNMARLNRTAAGLMH

SEQ ID NO: 1476 - protein, 12 aa, Homo sapiens
MAAAEAGGDDAR

SEQ ID NO: 1477 - protein, 14 aa, Homo sapiens
MAVWEAEQLGGLQR

SEQ ID NO: 1478 - protein, 7 aa, Homo sapiens
MEALENR

SEQ ID NO: 1479 - protein, 10 aa, Homo sapiens
MEFDEKELRR

SEQ ID NO: 1480 - protein, 25 aa, Homo sapiens
MESGRGSSTPPGPIAALGMPDTGPG

SEQ ID NO: 1481 - protein, 31 aa, Homo sapiens
MESGRGSSTPPGPIAALGMPDTGPGSSSLGK

SEQ ID NO: 1482 - protein, 6 aa, Homo sapiens
MESQLK

SEQ ID NO: 1483 - protein, 11 aa, Homo sapiens
MGMSFGLESGK

SEQ ID NO: 1484 - protein, 20 aa, Homo sapiens
MGNAAGSAEQPAGPAAPPPK

SEQ ID NO: 1485 - protein, 34 aa, Homo sapiens
MIISTPQRLTSSGSVLIGSPYTPAPAMVTQTHIA

SEQ ID NO: 1486 - protein, 9 aa, Homo sapiens
MILTNPEGR

SEQ ID NO: 1487 - protein, 14 aa, Homo sapiens
MKAAKSGTKDGLEK

SEQ ID NO: 1488 - protein, 15 aa, Homo sapiens
MLEDLGFKDLTLQPR

SEQ ID NO: 1489 - protein, 8 aa, Homo sapiens
MNSLTLNR

SEQ ID NO: 1490 - protein, 13 aa, Homo sapiens
MSDKSDLKAELER

SEQ ID NO: 1491 - protein, 32 aa, Homo sapiens
MSGSSGGAAAPAASSGPAAAASAAGSGCGGGA

SEQ ID NO: 1492 - protein, 11 aa, Homo sapiens
MSKSLGNVIHP

SEQ ID NO: 1493 - protein, 11 aa, Homo sapiens
MVSTSATDEPR

SEQ ID NO: 1494 - protein, 31 aa, Homo sapiens
NANSSPVASTTPSASATTNPASATTLDQSKA

SEQ ID NO: 1495 - protein, 12 aa, Homo sapiens
NATLVNEADKLR

SEQ ID NO: 1496 - protein, 20 aa, Homo sapiens
NAVLEHMEELQEQVALLTER

SEQ ID NO: 1497 - protein, 29 aa, Homo sapiens
NDKSYWLSTTAPLPMMPVAEDEIKPYISR

SEQ ID NO: 1498 - protein, 14 aa, Homo sapiens
NFVKEAEEISSNRR

SEQ ID NO: 1499 - protein, 14 aa, Homo sapiens
NILVSDMEMNEQQE

SEQ ID NO: 1500 - protein, 12 aa, Homo sapiens
NLAATLQDIETK

SEQ ID NO: 1501 - protein, 17 aa, Homo sapiens
NLEELYLVGSLSHDISR

SEQ ID NO: 1502 - protein, 27 aa, Homo sapiens
NLLEVSEVEQELACQNDHSSALQNIKR

SEQ ID NO: 1503 - protein, 22 aa, Homo sapiens
NLVGSGSEIQFLSEAQDDPQKR

SEQ ID NO: 1504 - protein, 9 aa, Homo sapiens
NRTEAEVKR

SEQ ID NO: 1505 - protein, 9 aa, Homo sapiens
NSLSVLSPK

SEQ ID NO: 1506 - protein, 19 aa, Homo sapiens
NTSAASTAQLVEATEELRR

SEQ ID NO: 1507 - protein, 12 aa, Homo sapiens
NVQVFLISGGFR

SEQ ID NO: 1508 - protein, 17 aa, Homo sapiens
NYPSSLCALCVGDEQGR

SEQ ID NO: 1509 - protein, 12 aa, Homo sapiens
PCPCPEGPGSQR

SEQ ID NO: 1510 - protein, 10 aa, Homo sapiens
PCQDVDECAR

SEQ ID NO: 1511 - protein, 15 aa, Homo sapiens
PDENLKSASKEELKK

SEQ ID NO: 1512 - protein, 19 aa, Homo sapiens
PEAYQVPASYQPDEEERAR

SEQ ID NO: 1513 - protein, 9 aa, Homo sapiens
PEGEMKPGR

SEQ ID NO: 1514 - protein, 20 aa, Homo sapiens
PETPYSGPGLLIDSLVLLPR

SEQ ID NO: 1515 - protein, 7 aa, Homo sapiens
PEVVWFK

SEQ ID NO: 1516 - protein, 16 aa, Homo sapiens
PGAGAVEVAMAEALIK

SEQ ID NO: 1517 - protein, 21 aa, Homo sapiens
PGEMGPQGPPGEPGFRGAPGK

SEQ ID NO: 1518 - protein, 14 aa, Homo sapiens
PGETPSWTGSGFVR

SEQ ID NO: 1519 - protein, 9 aa, Homo sapiens
PGFHGQAAR

SEQ ID NO: 1520 - protein, 25 aa, Homo sapiens
PGHVGQMGPVGAPGRPGPPGPPGPK

SEQ ID NO: 1521 - protein, 18 aa, Homo sapiens
PILPHLAEEVFQHIPYIK

SEQ ID NO: 1522 - protein, 19 aa, Homo sapiens
PKIDDVLHTLTGAMSLLRR

SEQ ID NO: 1523 - protein, 16 aa, Homo sapiens
PKMLVISGGDGYEDFR

SEQ ID NO: 1524 - protein, 21 aa, Homo sapiens
PPDIDKTELVEPTEYLVVHLK

SEQ ID NO: 1525 - protein, 10 aa, Homo sapiens
PPKPATPDFR

SEQ ID NO: 1526 - protein, 10 aa, Homo sapiens
PPVIQNPEYK

SEQ ID NO: 1527 - protein, 13 aa, Homo sapiens
PPVLGTESDATVK

SEQ ID NO: 1528 - protein, 10 aa, Homo sapiens
PQLLGVAPEK

SEQ ID NO: 1529 - protein, 13 aa, Homo sapiens
PRMSAQEQLERMR

SEQ ID NO: 1530 - protein, 19 aa, Homo sapiens
PSGPATAEDPGRRPVLPQR

SEQ ID NO: 1531 - protein, 14 aa, Homo sapiens
PTPRPVPMKRHIFR

SEQ ID NO: 1532 - protein, 9 aa, Homo sapiens
PVAGSELPR

SEQ ID NO: 1533 - protein, 7 aa, Homo sapiens
PYWCISR

SEQ ID NO: 1534 - protein, 9 aa, Homo sapiens
QAASPLEPK

SEQ ID NO: 1535 - protein, 11 aa, Homo sapiens
QAEEVNTEWEK

SEQ ID NO: 1536 - protein, 23 aa, Homo sapiens
QAEGLSEDGAAMAVEPTQIQLSK

SEQ ID NO: 1537 - protein, 13 aa, Homo sapiens
QAPSSFQLLYDLK

SEQ ID NO: 1538 - protein, 16 aa, Homo sapiens
QAQLEKELSAALQDKK

SEQ ID NO: 1539 - protein, 13 aa, Homo sapiens
QAQVNLTVVDKPD

SEQ ID NO: 1540 - protein, 15 aa, Homo sapiens
QDCDQALQLADGNVK

SEQ ID NO: 1541 - protein, 14 aa, Homo sapiens
QEMVIEVKAIGGKK

SEQ ID NO: 1542 - protein, 32 aa, Homo sapiens
QETPPPRSPPVANSGSTGFSRRGSGRGGGPTP

SEQ ID NO: 1543 - protein, 10 aa, Homo sapiens
QGPMTQAINR

SEQ ID NO: 1544 - protein, 15 aa, Homo sapiens
QHEVEEATNILTATR

SEQ ID NO: 1545 - protein, 15 aa, Homo sapiens
QIASLTGLVQSALLR

SEQ ID NO: 1546 - protein, 9 aa, Homo sapiens
QICSQLSER

SEQ ID NO: 1547 - protein, 9 aa, Homo sapiens
QKASGDSAR

SEQ ID NO: 1548 - protein, 14 aa, Homo sapiens
QKMEEEKRRTEEER

SEQ ID NO: 1549 - protein, 16 aa, Homo sapiens
QLELACETQEEVDSWK

SEQ ID NO: 1550 - protein, 26 aa, Homo sapiens
QLNETGGPVLVSAPISPEEQDKLENK

SEQ ID NO: 1551 - protein, 15 aa, Homo sapiens
QLPKPNQDTMQILFR

SEQ ID NO: 1552 - protein, 8 aa, Homo sapiens
QLQTLAPK

SEQ ID NO: 1553 - protein, 14 aa, Homo sapiens
QNGDSAYLYLLSAR

SEQ ID NO: 1554 - protein, 10 aa, Homo sapiens
QPDVEEILSK

SEQ ID NO: 1555 - protein, 26 aa, Homo sapiens
QQNLAVSESPVTPSALAELLDLLDSR

SEQ ID NO: 1556 - protein, 12 aa, Homo sapiens
QQQMHIVDMLSK

SEQ ID NO: 1557 - protein, 13 aa, Homo sapiens
QSSHNFQLESVNK

SEQ ID NO: 1558 - protein, 16 aa, Homo sapiens
QTLLAESEALTSYSHR

SEQ ID NO: 1559 - protein, 25 aa, Homo sapiens
QTSVADLLASFNDQSTSDYLVVYLR

SEQ ID NO: 1560 - protein, 27 aa, Homo sapiens
QVFGQTTIHQHIPFNWDSEFVQLHFGK

SEQ ID NO: 1561 - protein, 8 aa, Homo sapiens
QVVQDLLK

SEQ ID NO: 1562 - protein, 29 aa, Homo sapiens
RASAAAAAGGGATGHPGGGQGAENPAGLK

SEQ ID NO: 1563 - protein, 34 aa, Homo sapiens
RCDLCAPGYYGFGPTGCQACQCSHEGALSSLCEK

SEQ ID NO: 1564 - protein, 11 aa, Homo sapiens
RCEQVQPGYFR

SEQ ID NO: 1565 - protein, 16 aa, Homo sapiens
RDNEVDGQDYHFVVSR

SEQ ID NO: 1566 - protein, 32 aa, Homo sapiens
RDPSSNDINGGMEPTPSTVSTPSPSADLLGLR

SEQ ID NO: 1567 - protein, 16 aa, Homo sapiens
REMAAASAAAISGAGR

SEQ ID NO: 1568 - protein, 29 aa, Homo sapiens
RETLFTLDDQALGPELTAPAPEPPAEEPR

SEQ ID NO: 1569 - protein, 15 aa, Homo sapiens
RFSTEYELQQLEQFK

SEQ ID NO: 1570 - protein, 12 aa, Homo sapiens
RGSDELTVPRYR

SEQ ID NO: 1571 - protein, 19 aa, Homo sapiens
RIEGSGDQIDTYELSGGAR

SEQ ID NO: 1572 - protein, 10 aa, Homo sapiens
RKEEEEAEDK

SEQ ID NO: 1573 - protein, 20 aa, Homo sapiens
RLDIDEKPLVVQLNWNKDDR

SEQ ID NO: 1574 - protein, 22 aa, Homo sapiens
RPPEPEKAPPAAPTRPSALELK

SEQ ID NO: 1575 - protein, 13 aa, Homo sapiens
RPRPQGRSVSEPR

SEQ ID NO: 1576 - protein, 24 aa, Homo sapiens
RQAEGLSEDGAAMAVEPTQIQLSK

SEQ ID NO: 1577 - protein, 24 aa, Homo sapiens
RRKVPPSGSGGSELSNGEAGEAYR

SEQ ID NO: 1578 - protein, 14 aa, Homo sapiens
RSLELQTRTEEEKK

SEQ ID NO: 1579 - protein, 14 aa, Homo sapiens
RSSYLLAITTERSK

SEQ ID NO: 1580 - protein, 22 aa, Homo sapiens
RVAAQVDGGAQVQQVLNIECLR

SEQ ID NO: 1581 - protein, 9 aa, Homo sapiens
SAEESDRLR

SEQ ID NO: 1582 - protein, 14 aa, Homo sapiens
SCDCDPMGSQDGGR

SEQ ID NO: 1583 - protein, 22 aa, Homo sapiens
SDVLETVVLINPSDEAVSTEVR

SEQ ID NO: 1584 - protein, 13 aa, Homo sapiens
SEDYELLCPNGAR

SEQ ID NO: 1585 - protein, 15 aa, Homo sapiens
SFGSSLMESEVNLDR

SEQ ID NO: 1586 - protein, 20 aa, Homo sapiens
SGHDQVVELLLERGAPLLAR

SEQ ID NO: 1587 - protein, 23 aa, Homo sapiens
SGLTSLHLAAQEDKVNVADILTK

SEQ ID NO: 1588 - protein, 18 aa, Homo sapiens
SGRPSCLYSAARPSGSYR

SEQ ID NO: 1589 - protein, 15 aa, Homo sapiens
SGTIFDNFLITNDEA

SEQ ID NO: 1590 - protein, 18 aa, Homo sapiens
SGTLALVEPLVASLDPGR

SEQ ID NO: 1591 - protein, 25 aa, Homo sapiens
SKIVGAPMHDLLLWNNATVTTCHSK

SEQ ID NO: 1592 - protein, 9 aa, Homo sapiens
SKPEDWDER

SEQ ID NO: 1593 - protein, 26 aa, Homo sapiens
SLEGSDDAVLLQRRLDNMNFKWSELR

SEQ ID NO: 1594 - protein, 11 aa, Homo sapiens
SLNPEQWSQLK

SEQ ID NO: 1595 - protein, 27 aa, Homo sapiens
SLSDPSRRGELAGPGFEGPGGEPIREV

SEQ ID NO: 1596 - protein, 14 aa, Homo sapiens
SNRDELELELAENR

SEQ ID NO: 1597 - protein, 22 aa, Homo sapiens
SPARPQPGEGPGGPGGPPEVSR

SEQ ID NO: 1598 - protein, 22 aa, Homo sapiens
SPARPQPGEGPGGPGGPPEVSR

SEQ ID NO: 1599 - protein, 26 aa, Homo sapiens
SPDTTLSPASTTSSGVSEESTTSHSR

SEQ ID NO: 1600 - protein, 26 aa, Homo sapiens
SPDTTLSPASTTSSGVSEESTTSHSR

SEQ ID NO: 1601 - protein, 26 aa, Homo sapiens
SPDTTLSPASTTSSGVSEESTTSHSR

SEQ ID NO: 1602 - protein, 14 aa, Homo sapiens
SPFPSQHLEAPEDK

SEQ ID NO: 1603 - protein, 20 aa, Homo sapiens
SPGPPQVDGTPTMSLERPPR

SEQ ID NO: 1604 - protein, 24 aa, Homo sapiens
SPTTTLSPASMTSLGVGEESTTSR

SEQ ID NO: 1605 - protein, 24 aa, Homo sapiens
SPTTTLSPASMTSLGVGEESTTSR

SEQ ID NO: 1606 - protein, 24 aa, Homo sapiens
SPTTTLSPASMTSLGVGEESTTSR

SEQ ID NO: 1607 - protein, 24 aa, Homo sapiens
SPTTTLSPASMTSLGVGEESTTSR

SEQ ID NO: 1608 - protein, 19 aa, Homo sapiens
SQAYADYIGFILTLNEGVK

SEQ ID NO: 1609 - protein, 14 aa, Homo sapiens
SQMNCNLGTCQLQR

SEQ ID NO: 1610 - protein, 14 aa, Homo sapiens
SRQELNTIASKPPR

SEQ ID NO: 1611 - protein, 10 aa, Homo sapiens
SSHVTIDTLK

SEQ ID NO: 1612 - protein, 27 aa, Homo sapiens
SSQNDSPGDASEGPEYLAIGNLDPRGR

SEQ ID NO: 1613 - protein, 14 aa, Homo sapiens
STEYELQQLEQFKK

SEQ ID NO: 1614 - protein, 18 aa, Homo sapiens
STSFNVQDLLPDHEYKFR

SEQ ID NO: 1615 - protein, 19 aa, Homo sapiens
SVEQEVVQSQLNHCVNLYK

SEQ ID NO: 1616 - protein, 11 aa, Homo sapiens
SVYTMPLANHR

SEQ ID NO: 1617 - protein, 22 aa, Homo sapiens
SWAEDEKQKAETVQAALEEAQR

SEQ ID NO: 1618 - protein, 13 aa, Homo sapiens
SWCSGHLHLRCPR

SEQ ID NO: 1619 - protein, 10 aa, Homo sapiens
SYVDTGGVSR

SEQ ID NO: 1620 - protein, 11 aa, Homo sapiens
SYVITGSWNPK

SEQ ID NO: 1621 - protein, 10 aa, Homo sapiens
TAIWEDQNLR

SEQ ID NO: 1622 - protein, 16 aa, Homo sapiens
TALLTAGDIYLLSTFR

SEQ ID NO: 1623 - protein, 15 aa, Homo sapiens
TEALMDAQKEDFNSK

SEQ ID NO: 1624 - protein, 24 aa, Homo sapiens
TEFCLHDGPPYANGDPHVGHALNK

SEQ ID NO: 1625 - protein, 10 aa, Homo sapiens
TESSGGWQNR

SEQ ID NO: 1626 - protein, 24 aa, Homo sapiens
THIESSGHGVDTCLHVVLSSKVCR

SEQ ID NO: 1627 - protein, 24 aa, Homo sapiens
TKVHAELADVLTEAVVDSILAIKK

SEQ ID NO: 1628 - protein, 15 aa, Homo sapiens
TLEIALEQKKEECLK

SEQ ID NO: 1629 - protein, 15 aa, Homo sapiens
TLNATGEEIIQQSSK

SEQ ID NO: 1630 - protein, 8 aa, Homo sapiens
TLPSMVHR

SEQ ID NO: 1631 - protein, 7 aa, Homo sapiens
TMNGDMR

SEQ ID NO: 1632 - protein, 16 aa, Homo sapiens
TNHIGWVQEFLNEENR

SEQ ID NO: 1633 - protein, 10 aa, Homo sapiens
TNIQLPACLR

SEQ ID NO: 1634 - protein, 7 aa, Homo sapiens
TPDELQK

SEQ ID NO: 1635 - protein, 14 aa, Homo sapiens
TPLERDDLHESVFR

SEQ ID NO: 1636 - protein, 12 aa, Homo sapiens
TSGNQDEILVIR

SEQ ID NO: 1637 - protein, 49 aa, Homo sapiens
TTLSPASSTSPGLQGESTAFQTHPASTHTTPSPPSTATAPVEESTTYHR

SEQ ID NO: 1638 - protein, 49 aa, Homo sapiens; identical to SEQ ID NO: 1637

SEQ ID NO: 1639 - protein, 49 aa, Homo sapiens; identical to SEQ ID NO: 1637

SEQ ID NO: 1640 - protein, 14 aa, Homo sapiens
TTQGLTALLLSLKK

SEQ ID NO: 1641 - protein, 11 aa, Homo sapiens
TTQIINITMTK

SEQ ID NO: 1642 - protein, 9 aa, Homo sapiens
TWVQQSETK

SEQ ID NO: 1643 - protein, 12 aa, Homo sapiens
VAIGPSVLNAAR

SEQ ID NO: 1644 - protein, 19 aa, Homo sapiens
VAYIPDEMAAQQNPLQQPR

SEQ ID NO: 1645 - protein, 19 aa, Homo sapiens
VDSDMNDAYLGYAAAIILR

SEQ ID NO: 1646 - protein, 17 aa, Homo sapiens
VEDAYILTCNVSLEYEK

SEQ ID NO: 1647 - protein, 22 aa, Homo sapiens
VGAPMHDLLLWNNATVTTCHSK

SEQ ID NO: 1648 - protein, 11 aa, Homo sapiens
VHLFDIITQYR

SEQ ID NO: 1649 - protein, 10 aa, Homo sapiens
VIECFNVESR

SEQ ID NO: 1650 - protein, 15 aa, Homo sapiens
VLGHFEKPLFLELCR

SEQ ID NO: 1651 - protein, 9 aa, Homo sapiens
VLMDLQNQK

SEQ ID NO: 1652 - protein, 8 aa, Homo sapiens
VLTTSPSR

SEQ ID NO: 1653 - protein, 13 aa, Homo sapiens
VMLPPGAQHSDEK

SEQ ID NO: 1654 - protein, 35 aa, Homo sapiens
VNFRPRYVTRYKTVTQLEWRCCPGFRGGDCQEGPK

SEQ ID NO: 1655 - protein, 10 aa, Homo sapiens
VPDMAEIQSR

SEQ ID NO: 1656 - protein, 11 aa, Homo sapiens
VQLLSQYDNEK

SEQ ID NO: 1657 - protein, 20 aa, Homo sapiens
VSRASSPEGRHLPSPQLGTK

SEQ ID NO: 1658 - protein, 10 aa, Homo sapiens
VTCTGYHQVR

SEQ ID NO: 1659 - protein, 8 aa, Homo sapiens
VTEFDAAR

SEQ ID NO: 1660 - protein, 21 aa, Homo sapiens
VVQEENQHMQMTIQALQDELR

SEQ ID NO: 1661 - protein, 9 aa, Homo sapiens
VYLDLTPVK

SEQ ID NO: 1662 - protein, 11 aa, Homo sapiens
WCATSDPEQHK

SEQ ID NO: 1663 - protein, 13 aa, Homo sapiens
WFSIQNNQLVYQK

SEQ ID NO: 1664 - protein, 11 aa, Homo sapiens
WIEFCQLLSER

SEQ ID NO: 1665 - protein, 14 aa, Homo sapiens
WYQNPDYNFFNNYK

SEQ ID NO: 1666 - protein, 12 aa, Homo sapiens
YADSLKPNIPYK

SEQ ID NO: 1667 - protein, 12 aa, Homo sapiens
YENHSATAESSR

SEQ ID NO: 1668 - protein, 11 aa, Homo sapiens
YLITATLTPER

SEQ ID NO: 1669 - protein, 17 aa, Homo sapiens
YLQQPGCLLVGTNMDNR

SEQ ID NO: 1670 - protein, 12 aa, Homo sapiens
YLRELSGSGLER

SEQ ID NO: 1671 - protein, 21 aa, Homo sapiens
YLSASEYGSSVDGHPEVPETK

SEQ ID NO: 1672 - protein, 9 aa, Homo sapiens
YNASSQQQR

SEQ ID NO: 1673 - protein, 9 aa, Homo sapiens
YQETMSAIR

SEQ ID NO: 1674 - protein, 23 aa, Homo sapiens
YSFWLTTIPEQSFQGSPSADTLK

SEQ ID NO: 1675 - protein, 15 aa, Homo sapiens
YTKQGFGNLPICMAK

SEQ ID NO: 1676 - protein, 13 aa, Homo sapiens
YVPAIAHLIHSLN

SEQ ID NO: 1677 - protein, 21 aa, Homo sapiens
AAECLDVDECHRVPPPCDLGR

SEQ ID NO: 1678 - protein, 9 aa, Homo sapiens
AEGGKRPAR

SEQ ID NO: 1679 - protein, 23 aa, Homo sapiens
AEPVWTPPAPAPAAPPSTPAAPK

SEQ ID NO: 1680 - protein, 19 aa, Homo sapiens
AFLCPLICHNGGVCVKPDR

SEQ ID NO: 1681 - protein, 11 aa, Homo sapiens
AHLIHSLNPVR

SEQ ID NO: 1682 - protein, 13 aa, Homo sapiens
AIAHLIHSLNPVR

SEQ ID NO: 1683 - protein, 8 aa, Homo sapiens
AIWNVINW

SEQ ID NO: 1684 - protein, 11 aa, Homo sapiens
AIWNVINWENV

SEQ ID NO: 1685 - protein, 13 aa, Homo sapiens
ANGITMYAVGVGK

SEQ ID NO: 1686 - protein, 34 aa, Homo sapiens
AQPVPFVPQVLGVMIGAGVAVVVTAVLILLVVRR

SEQ ID NO: 1687 - protein, 8 aa, Homo sapiens
ARILTAAR

SEQ ID NO: 1688 - protein, 30 aa, Homo sapiens
AVGPGAGGAGSAVPGGAGPCATVSVFPGAR

SEQ ID NO: 1689 - protein, 16 aa, Homo sapiens
AYDNFGVLGLDLWQVK

SEQ ID NO: 1690 - protein, 8 aa, Homo sapiens
CVCPAGFR

SEQ ID NO: 1691 - protein, 9 aa, Homo sapiens
CVHGPTGSR

SEQ ID NO: 1692 - protein, 27 aa, Homo sapiens
CVPPRTSAGTFPGSQPQAPASPVLPAR

SEQ ID NO: 1693 - protein, 12 aa, Homo sapiens
DHPSSHSAQPPR

SEQ ID NO: 1694 - protein, 20 aa, Homo sapiens
DKERLQAMMTHLHVKSTEPK

SEQ ID NO: 1695 - protein, 14 aa, Homo sapiens
DLDNAEEKADALNK

SEQ ID NO: 1696 - protein, 17 aa, Homo sapiens
DLYSALIQFFQIFPEYK

SEQ ID NO: 1697 - protein, 36 aa, Homo sapiens
DPASDKLLGPAGLTWERNLPGAGVGKEMAGVPPTLR

SEQ ID NO: 1698 - protein, 21 aa, Homo sapiens
DSAVMDDSVVIPSHQVSTLAK

SEQ ID NO: 1699 - protein, 17 aa, Homo sapiens
DSSTPYQEIAAVPSAGR

SEQ ID NO: 1700 - protein, 12 aa, Homo sapiens
DWDSPYSHDLDT

SEQ ID NO: 1701 - protein, 13 aa, Homo sapiens
DWDSPYSHDLDTS

SEQ ID NO: 1702 - protein, 23 aa, Homo sapiens
EDLDQSPLVSSSDSPPRPQPAFK

SEQ ID NO: 1703 - protein, 14 aa, Homo sapiens
EESREPAPASPAPA

SEQ ID NO: 1704 - protein, 8 aa, Homo sapiens
ELSSKGVK

SEQ ID NO: 1705 - protein, 14 aa, Homo sapiens
EMELRRQALEEERR

SEQ ID NO: 1706 - protein, 7 aa, Homo sapiens
ENGTVPK

SEQ ID NO: 1707 - protein, 15 aa, Homo sapiens
ENKEVVLQWFTENSK

SEQ ID NO: 1708 - protein, 9 aa, Homo sapiens
EVAESPRPR

SEQ ID NO: 1709 - protein, 7 aa, Homo sapiens
FILDNLK

SEQ ID NO: 1710 - protein, 18 aa, Homo sapiens
FLEAVAEEKPHVKPYFSK

SEQ ID NO: 1711 - protein, 11 aa, Homo sapiens
FPIEGGQKDPK

SEQ ID NO: 1712 - protein, 27 aa, Homo sapiens
FSTEYELQQLEQFKKDNEETGFGSGTR

SEQ ID NO: 1713 - protein, 10 aa, Homo sapiens
FWPAIDDGLR

SEQ ID NO: 1714 - protein, 20 aa, Homo sapiens
FYIDFGGVKPMGSEPVPKSR

SEQ ID NO: 1715 - protein, 31 aa, Homo sapiens
GADLIEEAASRIVDAVIEQVKAAGALLTEGE

SEQ ID NO: 1716 - protein, 12 aa, Homo sapiens
GADYAEPTWNLK

SEQ ID NO: 1717 - protein, 16 aa, Homo sapiens
GDEEKDKGLQTSQDAR

SEQ ID NO: 1718 - protein, 12 aa, Homo sapiens
GDILQTPQFQMR

SEQ ID NO: 1719 - protein, 8 aa, Homo sapiens
GDNLPQYR

SEQ ID NO: 1720 - protein, 8 aa, Homo sapiens
GNEAVASR

SEQ ID NO: 1721 - protein, 15 aa, Homo sapiens
GPNKHTLTQIKDAVR

SEQ ID NO: 1722 - protein, 19 aa, Homo sapiens
GQGPMFLDADFVAFTNHFK

SEQ ID NO: 1723 - protein, 14 aa, Homo sapiens
GTATPELHTATDYR

SEQ ID NO: 1724 - protein, 21 aa, Homo sapiens
GWAGDSGPQGRPGVFGLPGEK

SEQ ID NO: 1725 - protein, 13 aa, Homo sapiens
GYLAPSGDLSLRR

SEQ ID NO: 1726 - protein, 8 aa, Homo sapiens
HAEQQALR

SEQ ID NO: 1727 - protein, 10 aa, Homo sapiens
IEDPSLLNSR

SEQ ID NO: 1728 - protein, 17 aa, Homo sapiens
IFMEEVPGGSLSSLLRS

SEQ ID NO: 1729 - protein, 17 aa, Homo sapiens
IFMEEVPGGSLSSLLRS

SEQ ID NO: 1730 - protein, 20 aa, Homo sapiens
IIEVAPQVATQNVNPTPGAT

SEQ ID NO: 1731 - protein, 10 aa, Homo sapiens
ILNSDQTTCR

SEQ ID NO: 1732 - protein, 12 aa, Homo sapiens
ISCWGHSEPSMR

SEQ ID NO: 1733 - protein, 12 aa, Homo sapiens
IVVHSVENMNFR

SEQ ID NO: 1734 - protein, 7 aa, Homo sapiens
KAVAHMK

SEQ ID NO: 1735 - protein, 11 aa, Homo sapiens
KDITAALAAER

SEQ ID NO: 1736 - protein, 13 aa, Homo sapiens
KDNEETGFGSGTR

SEQ ID NO: 1737 - protein, 13 aa, Homo sapiens
KHQGHFLLGTLSR

SEQ ID NO: 1738 - protein, 9 aa, Homo sapiens
KIAEIQARR

SEQ ID NO: 1739 - protein, 9 aa, Homo sapiens
KKEADMQQK

SEQ ID NO: 1740 - protein, 10 aa, Homo sapiens
KLFGGPGSRR

SEQ ID NO: 1741 - protein, 20 aa, Homo sapiens
KPAAGLSAAPVPTAPAAGAP

SEQ ID NO: 1742 - protein, 25 aa, Homo sapiens
KSSTGSPTSPLNAEKLESEEDVSQA

SEQ ID NO: 1743 - protein, 15 aa, Homo sapiens
KVVATTQMQAADARK

SEQ ID NO: 1744 - protein, 14 aa, Homo sapiens
LADSDQASKVQQQK

SEQ ID NO: 1745 - protein, 8 aa, Homo sapiens
LAYVSCVR

SEQ ID NO: 1746 - protein, 33 aa, Homo sapiens
LGIVQGIVGARNTSAASTAQLVEATEELRREIG

SEQ ID NO: 1747 - protein, 16 aa, Homo sapiens
LHYNELGAKVTERKQQ

SEQ ID NO: 1748 - protein, 14 aa, Homo sapiens
LIEVGPSGAQFLGK

SEQ ID NO: 1749 - protein, 10 aa, Homo sapiens
LKQTNLQWIK

SEQ ID NO: 1750 - protein, 7 aa, Homo sapiens
LKTVFYR

SEQ ID NO: 1751 - protein, 14 aa, Homo sapiens
LLISCWGHSEPSMR

SEQ ID NO: 1752 - protein, 13 aa, Homo sapiens
LMFDRSEVYGPMK

SEQ ID NO: 1753 - protein, 9 aa, Homo sapiens
LMLEWQFQK

SEQ ID NO: 1754 - protein, 11 aa, Homo sapiens
LPAAPPVAPER

SEQ ID NO: 1755 - protein, 14 aa, Homo sapiens
LPPVLGTESDATVK

SEQ ID NO: 1756 - protein, 7 aa, Homo sapiens
LPQEPGR

SEQ ID NO: 1757 - protein, 14 aa, Homo sapiens
LQGQDSERVRAWQR

SEQ ID NO: 1758 - protein, 9 aa, Homo sapiens
LSRKGGHER

SEQ ID NO: 1759 - protein, 11 aa, Homo sapiens
LTELENELNTK

SEQ ID NO: 1760 - protein, 9 aa, Homo sapiens
LTGKAEGGK

SEQ ID NO: 1761 - protein, 8 aa, Homo sapiens
LWEAVKRR

SEQ ID NO: 1762 - protein, 13 aa, Homo sapiens
LWHLDPDTEYEIR

SEQ ID NO: 1763 - protein, 11 aa, Homo sapiens
LYGVVLTPPMK

SEQ ID NO: 1764 - protein, 15 aa, Homo sapiens
MELEEVTRLLNLKDK

SEQ ID NO: 1765 - protein, 13 aa, Homo sapiens
MIEDSGPGMKVLL

SEQ ID NO: 1766 - protein, 10 aa, Homo sapiens
MPVAGSELPR

SEQ ID NO: 1767 - protein, 13 aa, Homo sapiens
NFVLVLSPGALDK

SEQ ID NO: 1768 - protein, 14 aa, Homo sapiens
NIMFGPDICGPGTK

SEQ ID NO: 1769 - protein, 24 aa, Homo sapiens
NITIIVEDPIAESCNDKAKLRGPL

SEQ ID NO: 1770 - protein, 34 aa, Homo sapiens
NPKAEVARAQAALAVNISAARGLQDVLRTNLGPK

SEQ ID NO: 1771 - protein, 7 aa, Homo sapiens
NQVTQLK

SEQ ID NO: 1772 - protein, 11 aa, Homo sapiens
NVINWENVTER

SEQ ID NO: 1773 - protein, 9 aa, Homo sapiens
PGHYDILYK

SEQ ID NO: 1774 - protein, 12 aa, Homo sapiens
PGSPGLPGMPGR

SEQ ID NO: 1775 - protein, 14 aa, Homo sapiens
PLEEGLNKAIHYFR

SEQ ID NO: 1776 - protein, 8 aa, Homo sapiens
PLSTRVPR

SEQ ID NO: 1777 - protein, 10 aa, Homo sapiens
PSAGFLPTHR

SEQ ID NO: 1778 - protein, 21 aa, Homo sapiens
PSGPQPQADLQALLQSGAQVR

SEQ ID NO: 1779 - protein, 29 aa, Homo sapiens
PSSSGSTGTKLSPARSTTSGLVGESTPSR

SEQ ID NO: 1780 - protein, 29 aa, Homo sapiens
PSSSGSTGTKLSPARSTTSGLVGESTPSR

SEQ ID NO: 1781 - protein, 13 aa, Homo sapiens
QGYILNSDQTTCR

SEQ ID NO: 1782 - protein, 8 aa, Homo sapiens
QVFEELWK

SEQ ID NO: 1783 - protein, 14 aa, Homo sapiens
QVKPKTVSEEERKV

SEQ ID NO: 1784 - protein, 15 aa, Homo sapiens
QYISKMIEDSGPGMK

SEQ ID NO: 1785 - protein, 16 aa, Homo sapiens
QYMPWEAALSSLSYFK

SEQ ID NO: 1786 - protein, 21 aa, Homo sapiens
RADVLAFPSSGFTDLAEIVSR

SEQ ID NO: 1787 - protein, 11 aa, Homo sapiens
RAVAAQPGRKR

SEQ ID NO: 1788 - protein, 20 aa, Homo sapiens
RDEGSQDQTGSLSRARPSSR

SEQ ID NO: 1789 - protein, 20 aa, Homo sapiens
RDPEVGKDELSKPSSDAESR

SEQ ID NO: 1790 - protein, 19 aa, Homo sapiens
RMQSSADLIIQEFMDLRTR

SEQ ID NO: 1791 - protein, 10 aa, Homo sapiens
SASFEPFSNK

SEQ ID NO: 1792 - protein, 23 aa, Homo sapiens
SDQIGLPDFNAGAMENWGLVTYR

SEQ ID NO: 1793 - protein, 13 aa, Homo sapiens
SFACQCPEGHVLR

SEQ ID NO: 1794 - protein, 33 aa, Homo sapiens
SFLKLILQVEKWQEECEEGEGRTIIHCLNGGGR

SEQ ID NO: 1795 - protein, 35 aa, Homo sapiens
SFPAAQIPIAVEEPGSSSRESVSKAGMPVSADAAK

SEQ ID NO: 1796 - protein, 9 aa, Homo sapiens
SFTQGEGAR

SEQ ID NO: 1797 - protein, 14 aa, Homo sapiens
SFTQGEGARPLSTR

SEQ ID NO: 1798 - protein, 11 aa, Homo sapiens
SHTLSHASYLR

SEQ ID NO: 1799 - protein, 7 aa, Homo sapiens
SLEQLQK

SEQ ID NO: 1800 - protein, 14 aa, Homo sapiens
SPHTTLSPAGSTTR

SEQ ID NO: 1801 - protein, 14 aa, Homo sapiens
SPHTTLSPAGSTTR

SEQ ID NO: 1802 - protein, 14 aa, Homo sapiens
SPHTTLSPAGSTTR

SEQ ID NO: 1803 - protein, 14 aa, Homo sapiens
SPHTTLSPAGSTTR

SEQ ID NO: 1804 - protein, 9 aa, Homo sapiens
SQTLIDLNR

SEQ ID NO: 1805 - protein, 12 aa, Homo sapiens
SSHNFQLESVNK

SEQ ID NO: 1806 - protein, 9 aa, Homo sapiens
STCAPSPQR

SEQ ID NO: 1807 - protein, 9 aa, Homo sapiens
STTFYSSPR

SEQ ID NO: 1808 - protein, 9 aa, Homo sapiens
STTFYSSPR

SEQ ID NO: 1809 - protein, 9 aa, Homo sapiens
STTFYSSPR

SEQ ID NO: 1810 - protein, 9 aa, Homo sapiens
STTFYSSPR

SEQ ID NO: 1811 - protein, 9 aa, Homo sapiens
STTFYSSPR

SEQ ID NO: 1812 - protein, 9 aa, Homo sapiens
STTFYSSPR

SEQ ID NO: 1813 - protein, 9 aa, Homo sapiens
STTFYSSPR

SEQ ID NO: 1814 - protein, 9 aa, Homo sapiens
STTFYSSPR

SEQ ID NO: 1815 - protein, 9 aa, Homo sapiens
STTFYSSPR

SEQ ID NO: 1816 - protein, 16 aa, Homo sapiens
TATAGAISELTESRLR

SEQ ID NO: 1817 - protein, 14 aa, Homo sapiens
TEVAIGPSVLNAAR

SEQ ID NO: 1818 - protein, 10 aa, Homo sapiens
TGDPQETLRR

SEQ ID NO: 1819 - protein, 26 aa, Homo sapiens
THLSLSHNPEQKGVPTGFILPIRDIR

SEQ ID NO: 1820 - protein, 8 aa, Homo sapiens
THTATGIR

SEQ ID NO: 1821 - protein, 10 aa, Homo sapiens
TLATQLNQQK

SEQ ID NO: 1822 - protein, 17 aa, Homo sapiens
TPVPEKVPPPKPATPDF

SEQ ID NO: 1823 - protein, 10 aa, Homo sapiens
TVQQPTVQHR

SEQ ID NO: 1824 - protein, 13 aa, Homo sapiens
TYQGFWNPPLAPR

SEQ ID NO: 1825 - protein, 37 aa, Homo sapiens
VLCGDAGLLRGLADGLVQAGVGTEALLTPLVGRLARL

SEQ ID NO: 1826 - protein, 37 aa, Homo sapiens; identical to SEQ ID NO: 1825

SEQ ID NO: 1827 - protein, 10 aa, Homo sapiens
VNYDEENWRK

SEQ ID NO: 1828 - protein, 8 aa, Homo sapiens
VPEGFTCR

SEQ ID NO: 1829 - protein, 12 aa, Homo sapiens
WSELRKKSLNIR

SEQ ID NO: 1830 - protein, 25 aa, Homo sapiens
WSSRGSGGWGVYRSPSFGAGEGLLR

SEQ ID NO: 1831 - protein, 15 aa, Homo sapiens
WYQPSFHGVDLSALR

SEQ ID NO: 1832 - protein, 13 aa, Homo sapiens
YCNPGDVCYYASR

SEQ ID NO: 1833 - protein, 22 aa, Homo sapiens
YGNLGHVNIGAIQEPLAFILPK

SEQ ID NO: 1834 - protein, 8 aa, Homo sapiens
YITISGNR

SEQ ID NO: 1835 - protein, 13 aa, Homo sapiens
YLSYTLNPDLIRK

SEQ ID NO: 1836 - protein, 6 aa, Homo sapiens
YMVTER

SEQ ID NO: 1837 - DNA, 18 bp, Artifical Sequence
  Primer
ggagtagatacgctccgt

SEQ ID NO: 1838 - DNA, 23 bp, Artifical Sequence
  Primer
cacagccagtggccgctcaggta

SEQ ID NO: 1839 - DNA, 21 bp, Artifical Sequence
  Primer
cttctccactgccaggatgtt

SEQ ID NO: 1840 - DNA, 18 bp, Artifical Sequence
  Primer
taggagaatgtactgtat

SEQ ID NO: 1841 - DNA, 20 bp, Artifical Sequence
  Primer
ggagacactggatgggagtc

SEQ ID NO: 1842 - DNA, 20 bp, Artifical Sequence
  Primer
cgagaaaccacaacctgcat

SEQ ID NO: 1843 - DNA, 19 bp, Artifical Sequence
  Primer
tccctggagaagagctacg

SEQ ID NO: 1844 - DNA, 20 bp, Artifical Sequence
  Primer
gtagtttcgtggatgccaca

SEQ ID NO: 1845 - DNA, 20 bp, Artifical Sequence
  Primer
ttgtgagtggttcagcggta

SEQ ID NO: 1846 - DNA, 21 bp, Artifical Sequence
  Primer
tcaagcgaaaccatctcttct

SEQ ID NO: 1847 - protein, 222 aa, Homo sapiens
MACPWKFLFKTKFHQYAMNGEKDINNNVEKAPCATSSPVTQDDLQYHNLSKQQNESPQPLVETGKKSPESLVKLDATPLSSPRHVRIKNWGSGMTFQDTLHHKAKGILTCRSKSCLGSIMTPKSLTRGPRDKPTPPDELLPQAIEFVNQYYGSFKEAKIEEHLARVEAVTKEIETTGTYQLTGDELIFATKQAWRNAPRCIGRIQWSNLQVFDARSCSTARE

SEQ ID NO: 1848 - protein, 255 aa, Homo sapiens
MGPGRPAPAPWPRHLLRCVLLLGCLHLGRPGAPGDAALPEPNVFLIFSHGLQGCLEAQGGQVRVTPACNTSLPAQRWKWVSRNRLFNLGTMQCLGTGWPGTNTTASLGMYECDREALNLRWHCRTLGDQLSLLLGARTSNISKPGTLERGDQTRSGQWRIYGSEEDLCALPYHEVYTIQGNSHGKPCTIPFKYDNQWFHGCTSTGREDGHLWCATTQDYGKDERWGFCPIKSNDCETFWDKDQLTDSCYQFNFQS

SEQ ID NO: 1849 - protein, 110 aa, Homo sapiens
MNASSEGESFAGSVQIPGGTTVLVELTPDIHICGICKQQFNNLDAFVAHKQSGCQLTGTSAAAPSTVQFVSEETVPATQTQTTTRTITSETQTITVSAPEFVFEHGYQTY

SEQ ID NO: 1850 - protein, 134 aa, Homo sapiens
MEDDAPVIYGLEFQARALTPQTAETDAIRFLVGTQSLKYDNQIHIIDFDDENNIINKNVLLHQAGEIWHISASPADRGVLTTCYNRRDIIESFGILPVAQSPTIVFVNTLHQVFFRGQVAASDSKVLTCAAVWR

SEQ ID NO: 1851 - protein, 65 aa, Homo sapiens
MLEAILGGGGLPVEGRGSTEFEAFRLILFGSEDSVLPSPLLYKMAHMGSDGGVLPVHYATILFSL

SEQ ID NO: 1852 - protein, 255 aa, Homo sapiens
MAAAARPRGRALGPVLPPTPLLLLVLRVLPACGATARDPGAAAGLSLHPTYFNLAEAARIWATATCGERGPGEGRPQPELYCKLVGGPTAPGSGHTIQGQFCDYCNSEDPRKAHPVTNAIDGSERWWQSPPLSSGTQYNRVNLTLDLGQLFHVAYILIKFANSPRPDLWVLERSVDFGSTYSPWQYFAHSKVDCLKEFGREANMAVTRDDDVLCVTEYSRIVPLENGEVVVSLINGRPGAKNFTFSHTLREFTKA

SEQ ID NO: 1853 - protein, 255 aa, Homo sapiens
MPSVSKAAAAALSGSPPQTEKPTHYRYLKEFRTEQCPLFSQHKCAQHRPFTCFHWHFLNQRRRRPLRRRDGTFNYSPDVYCSKYNEATGVCPDGDECPYLHRTTGDTERKYHLRYYKTGTCIHETDARGHCVKNGLHCAFAHGPLDLRPPVCDVRELQAQEALQNGQLGGGEGVPDLQPGVLASQAMIEKILSEDPRWQDANFVLGSYKTEQCPKPPRLCRQGYACPHYHNSRDRRRNPRRFQYRSTPCPSVKHG

SEQ ID NO: 1854 - protein, 255 aa, Homo sapiens
MARAQALVLALTFQLCAPETETPAAGCTFEEASDPAVPCEYSQAQYDDFQWEQVRIHPGTRAPADLPHGSYLMVNTSQHAPGQRAHVIFQSLSENDTHCVQFSYFLYSRDGHSPGTLGVYVRVNGGPLGSAVWNMTGSHGRQWHQAELAVSTFWPNEYQVLFEALISPDRRGYMGLDDILLLSYPCAKAPHFSRLGDVEVNAGQNASFQCMAAGRAAEAERFLLQRQSGALVPAAGVRHISHRRFLATFPLAAVS

SEQ ID NO: 1855 - protein, 116 aa, Homo sapiens
METRESEDLEKTRRKSASDQWNTDNEPAKVKPELLPEKEETSQADQDIQDKEPHCHIPIKRNSIFNRSIRRKSKAKARDNPERNASCLADSQDNGKSVNEPLTLNIPWSRMPPCRT

SEQ ID NO: 1856 - protein, 65 aa, Homo sapiens
MTTSGHACPVPAVNGHMTHYPATPYPLLFPPVIGGLSLPPLHGLHGHPPPSGCSTPSPATIETQS

SEQ ID NO: 1857 - protein, 146 aa, Homo sapiens
MTRLSWCFSCVIRWGKYLFSCLLPLRFCLRSQPEDLEAPKTHRFKVKTFKKVKPCGICRQVITQEGCTCKVCSFSCHRKCQAKVAAPCVPPSNHELVPITTENAPKNVVDKGEGASRGGNTRKSLEDNGSTRVTPSVQPHLQPIRN

SEQ ID NO: 1858 - protein, 145 aa, Homo sapiens
MKNYKAIGKIGEGTFSEVMKMQSLRDGNYYACKQMKQRFESIEQVNNLREIQALRRLNPHPNILMLHEVVFDRKSGSLALICELMDMNIYELIRGRRYPLSEKKIMHYMYQLCKSLDHIHRNGIFHRDVKPENILIKQDVLKLGD

SEQ ID NO: 1859 - protein, 32 aa, Homo sapiens
MARPGLIHSAPGLPDTCALLQPPAASAAAAPS

SEQ ID NO: 1860 - protein, 255 aa, Homo sapiens
MPTWGARPASPDRFAVSAEAENKVREQQPHVERIFSVGVSVLPKDCPDNPHIWLQLEGPKENASRAKEYLKGLCSPELQDEIHYPPKLHCIFLGAQGFFLDCLAWSTSAHLVPRAPGSLMISGLTEAFVMAQSRVEELAERLSWDFTPGPSSGASQCTGVLRDFSALLQSPGDAHREALLQLPLAVQEELLSLVQEASSGQGPGALASWEGRSSALLGAQCQGVRAPPSDGRESLDTGSMGPGDCRGARGDTYAV

SEQ ID NO: 1861 - protein, 255 aa, Homo sapiens
MVLYTTPFPNSCLSALHCVSWALIFPCYWLVDRLAASFIPTTYEKRQRADDPCCLQLLCTALFTPIYLALLVASLPFAFLGFLFWSPLQSARRPYIYSRLEDKGLAGGAALLSEWKGTGPGKSFCFATANVCLLPDSLARVNNLFNTQARAKEIGQRIRNGAARPQIKIYIDSPTNTSISAASFSSLVSPQGGDGVARAVPGSIKRTASVEYKGDGGRHPGDEAANGPASGDPVDSSSPEDACIVRIGGEEGGRP

SEQ ID NO: 1862 - protein, 255 aa, Homo sapiens
MLGAGLIKIRGDRCWRDLTCMDFHYETQPMPNPVAYYLHHSPWWFHRFETLSNHFIELLVPFFLFLGRRACIIHGVLQILFQAVLIVSGNLSFLNWLTMVPSLACFDDATLGFLFPSGPGSLKDRVLQMQRDIRGARPEPRFGSVVRRAANVSLGVLLAWLSVPVVLNLLSSRQVMNTHFNSLHIVNTYGAFGSITKERAEVILQGTASSNASAPDAMWEDYEFKCKPGDPSRRPCLISPYHYRLDWLMWFAAFQ

SEQ ID NO: 1863 - protein, 255 aa, Homo sapiens
MEGSRPRSSLSLASSASTISSLSSLSPKKPTRAVNKIHAFGKRGNALRRDPNLPVHIRGWLHKQDSSGLRLWKRRWFVLSGHCLFYYKDSREESVLGSVLLPSYNIRPDGPGAPRGRRFTFTAEHPGMRTYVLAADTLEDLRGWLRALGRASRAEGDDYGQPRSPARPQPGEGPGGPGGPPEVSRGEEGRISESPEVTRLSRGRGRPRLLTPSPTTDLHSGLQMRRARSPDLFTPLSRPPSPLSLPRPRSAPARR

SEQ ID NO: 1864 - protein, 255 aa, Homo sapiens
MAPPSEETPLIPQRSCSLLSTEAGALHVLLPARGPGPPQRLSFSFGDHLAEDLCVQAAKASGILPVYHSLFALATEDLSCWFPPSHIFSVEDASTQVLLYRIRFYFPNWFGLEKCHRFGLRKDLASAILDLPVLEHLFAQHRSDLVSGRLPVGLSLKEQGECLSLAVLDLARMAREQAQRPGELLKTVSYKACLPPSLRDLIQGLSFVTRRRIRRTVRRALRRVAACQADRHSLMAKYIMDLERLDPAGAAETFH

SEQ ID NO: 1865 - protein, 82 aa, Homo sapiens
MQAPVPHSQRRESFLYRSDSDYELSPKAMSRNSSVASDLHGEDMIVTPFAQVLASLRTVRSNVAALARQQCLGAAKQGPVGN

SEQ ID NO: 1866 - protein, 98 aa, Homo sapiens
MAKERRRAVLELLQRPGNARCADCGAPDPDWASYTLGVFICLSCSGIHRNIPQVSKVKSVRLDAWEEAQVEFMASHGNDAARARFESKVPSFYYRPTP

SEQ ID NO: 1867 - protein, 255 aa, Homo sapiens
MKAPAVLAPGILVLLFTLVQRSNGECKEALAKSEMNVNMKYQLPNFTAETPIQNVILHEHHIFLGATNYIYVLNEEDLQKVAEYKTGPVLEHPDCFPCQDCSSKANLSGGVWKDNINMALVVDTYYDDQLISCGSVNRGTCQRHVFPHNHTADIQSEVHCIFSPQIEEPSQCPDCVVSALGAKVLSSVKDRFINFFVGNTINSSYFPDHPLHSISVRRLKETKDGFMFLTDQSYIDVLPEFRDSYPIKYVHAFES

SEQ ID NO: 1868 - protein, 37 aa, Homo sapiens
MATHHTLWMGLALLGVLGDLQAAPEAQVSVQPNFQQD

SEQ ID NO: 1869 - protein, 28 aa, Homo sapiens
MDQHQHLNKTAESASSEKKKTRRCNGFK

SEQ ID NO: 1870 - protein, 255 aa, Homo sapiens
MWGRFLAPEASGRDSPGGARSFPAGPDYSSAWLPANESLWQATTVPSNHRNNHIRRHSIASDSGDTGIGTSCSDSVEDHSTSSGTLSFKPSQSLITLPTAHVMPSNSSASISKLRESLTPDGSKWSTSLMQTLGNHSRGEQDSSLDMKDFRPLRKWSSLSKLTAPDNCGQGGTVCREESRNGLEKIGKAKALTSQLRTIGPSCLHDSMEMLRLEDKEINKKRSSTLDCKYKFESCSKEDFRASSSTLRRQPVDMT

SEQ ID NO: 1871 - protein, 237 aa, Homo sapiens
  misc_feature (1)..(1): Xaa can be any naturally occurring amino acid
XEKTCSSLEREPHFSLLTMRGQRLPLDIQIFYCARPDEEPFVKIITVEEAKRRKSTCSYYEDEDEEVLPVLRPHSALLENMHIEQLARRLPARVQGYPWRLAYSTLEHGTSLKTLYRKSASLDSPVLLVIKDMDNQIFGAYATHPFKFSDHYYGTGETFLYTFSPHFKVFKWSGENSYFINGDISSLELGGGGGRFGLWLDADLYHGRSNSCSTFNNDILSKKEDFIVQDLEVWAFD

SEQ ID NO: 1872 - protein, 255 aa, Homo sapiens
MEQPQEEAPEVREEEEKEEVAEAEGAPELNGGPQHALPSSSYTDLSRSSSPPSLLDQLQMGCDGASCGSLNMECRVCGDKASGFHYGVHACEGCKGFFRRTIRMKLEYEKCERSCKIQKKNRNKCQYCRFQKCLALGMSHNAIRFGRMPEAEKRKLVAGLTANEGSQYNPQVADLKAFSKHIYNAYLKNFNMTKKKARSILTGKASHTAPFVIHDIETLWQAEKGLVWKQLVNGLPPYKEISVHVFYRCQCTTVE

SEQ ID NO: 1873 - protein, 255 aa, Homo sapiens
MMDIYVCLKRPSWMVDNKRMRTASNFQWLLSTFILLYLMNQVNSQKKGAPHDLKCVTNNLQVWNCSWKAPSGTGRGTDYEVCIENRSRSCYQLEKTSIKIPALSHGDYEITINSLHDFGSSTSKFTLNEQNVSLIPDTPEILNLSADFSTSTLYLKWNDRGSVFPHRSNVIWEIKVLRKESMELVKLVTHNTTLNGKDTLHHWSWASDMPLECAIHFVEIRCYIDNLHFSGLEEWSDWSPVKNISWIPDSQTKVF

SEQ ID NO: 1874 - protein, 245 aa, Homo sapiens
MASVFMCGVEDLLFSGSRFVWNLTVSTLRRWYTERLRACHQVLRTWCGLQDVYQMTEGRHCQVHLLDDRRLELLVQPKLLARELLDLVASHFNLKEKEYFGITFIDDTGQQNWLQLDHRVLDHDLPKKPGPTILHFAVRFYIESISFLKDKTTVELFFLNAKACVHKGQIEVESETIFKLAAFILQEAKGDYTSDENARKDLKTLPAFPTKTLQEHPSLAYCEDRVIEHYLKIKGLTRGQAVVQY

SEQ ID NO: 1875 - protein, 255 aa, Homo sapiens
MKKFFDSRREQGGSGLGSGSSGGGGSTSGLGSGYIGRVFGIGRQQVTVDEVLAEGGFAIVFLVRTSNGMKCALKRMFVNNEHDLQVCKREIQIMRDLSGHKNIVGYIDSSINNVSSGDVWEVLILMDFCRGGQVVNLMNQRLQTGFTENEVLQIFCDTCEAVARLHQCKTPIIHRDLKVENILLHDRGHYVLCDFGSATNKFQNPQTEGVNAVEDEIKKYTTLSYRAPEMVNLYSGKIITTKADIWALGCLLYKL

SEQ ID NO: 1876 - protein, 40 aa, Homo sapiens
MSSNSDTGDLQESLKHGLTPIGAGLPDRHGSPIPARGRLV

SEQ ID NO: 1877 - protein, 36 aa, Homo sapiens
MDAGKLARHPTDTGSERAVPALAEIRPWWAPPLRPQ

SEQ ID NO: 1878 - protein, 255 aa, Homo sapiens
MKAAYTAYRCLTKDLEGCAMNPELTMESLGTLHGPAGGGSGGGGGGGGGGGGGGPGHEQELLASPSPHHAGRGAAGSLRGPPPPPTAHQELGTAAAAAAAASRSAMVTSMASILDGGDYRPELSIPLHHAMSMSCDSSPPGMGMSNTYTTLTPLQPLPPISTVSDKFHHPHPHHHPHHHHHHHHQRLSGNVSGSFTLMRDERGLPAMNNLYSPYKEMPGMSQSLSPLAATPLGNGLGGLHNAQQSLPNYGPPGHD

SEQ ID NO: 1879 - protein, 255 aa, Homo sapiens
MDEKTKKAEEMALSLTRAVAGGDEQVAMKCAIWLAEQRVPLSVQLKPEVSPTQDIRLWVSVEDAQMHTVTIWLTVRPDMTVASLKDMVFLDYGFPPVLQQWVIGQRLARDQETLHSHGVRQNGDSAYLYLLSARNTSLNPQELQRERQLRMLEDLGFKDLTLQPRGPLEPGPPKPGVPQEPGRGQPDAVPEPPPVGWQCPGCTFINKPTRPGCEMCCRARPEAYQVPASYQPDEEERARLAGEEEALRQYQQRKQ

SEQ ID NO: 1880 - protein, 255 aa, Homo sapiens
MSALASRSAPAMQSSGSFNYARPKQFIAAQNLGPASGHGTPASSPSSSSLPSPMSPTPRQFGRAPVPPFAQPFGAEPEAPWGSSSPSPPPPPPPVFSPTAAFPVPDVFPLPPPPPPLPSPGQASHCSSPATRFGHSQTPAAFLSALLPSQPPPAAVNALGLPKGVTPAGFPKKASRTARIASDEEIQGTKDAVIQDLERKLRFKEDLLNNGQPRLTYEERMARRLLGADSATVFNIQEPEEETANQEYKVSSCEQ

SEQ ID NO: 1881 - protein, 134 aa, Homo sapiens
MSGKVTKPKEEKDASKVLDDAPPGTQEYIMLRQDSIQSAELKKKESPFRAKCHEIFCCPLKQVHHKENTEPEEPQLKGIVTKLYSRQGYHLQLQADGTIDGTKDEDSTYTLFNLIPVGLRVVAIQGVQTKLYLA

SEQ ID NO: 1882 - protein, 136 aa, Homo sapiens
MYHSLSETRHPLQPEEQEVGIDPLSSYSNKSGGDSNKNGRRTSSTLDSEGTFNSYRKEWEELFVNNNYLATIRQKGINGQLRSSRFRSICWKLFLCVLPQDKSQWISRIEELRAWYSNIKEIHITNPRKVVGQQDL

SEQ ID NO: 1883 - protein, 165 aa, Homo sapiens
MWEASGMEERALEELAMEETALDPLLAEAAGAVDGEGAPPGGPSAQAATMRVNEKYSTLPAEDRSVHIINICAIEDIGYLPSEGTLLNSLSVDPDAECKYGLYFRDGRRKVDYILVYHHKRPSGNRTLVRRVQHSDTPSGARSVKQDHPLPGKGASLDAGSGEPP

SEQ ID NO: 1884 - protein, 255 aa, Homo sapiens
MATQAYTELQAAPPPSQPPQAPPQAQPQPPPPPPPAAPQPPQPPTAAATPQPQYVTELQSPQPQAQPPGGQKQYVTELPAVPAPSQPTGAPTPSPAPQQYIVVTVSEGAMRASETVSEASPGSTASQTGVPTQVVQQVQGTQQRLLVQTSVQAKPGHVSPLQLTNIQVPQQALPTQRLVVQSAAPGSKGGQVSLTVHGTQQVHSPPEQSPVQANSSSSKTAGAPTGTVPQQLQVHGVQQSVPVTQERSVVQATPQ

SEQ ID NO: 1885 - protein, 246 aa, Homo sapiens
MFGRKRSVSFGGFGWIDKTMLASLKVKKQELANSSDATLPDRPLSPPLTAPPTMKSSEFFEMLEKMQGIKLEEQKPGPQKNKDDYIPYPSIDEVVEKGGPYPQVILPQFGGYWIEDPENVGTPTSLGSSICEEEEEDNLSPNTFGYKLECKGEARAYRRHFLGKDHLNFYCTGSSLGNLILSVKCEEAEGIEYLRVILRSKLKTVHERIPLAGLSKLPSVPQIAKAFCDDAVGLRFNPVLYPKASQ

SEQ ID NO: 1886 - protein, 255 aa, Homo sapiens
MCVRRSLVGLTFCTCYLASYLTNKYVLSVLKFTYPTLFQGWQTLIGGLLLHVSWKLGWVEINSSSRSHVLVWLPASVLFVGIIYAGSRALSRLAIPVFLTLHNVAEVIICGYQKCFQKEKTSPAKICSALLLLAAAGCLPFNDSQFNPDGYFWAIIHLLCVGAYKILQKSQKPSALSDIDQQYLNYIFSVVLLAFASHPTGDLFSVLDFPFLYFYRFHGSCCASGFLGFFLMFSTVKLKNLLAPGQCAAWIFFAK

SEQ ID NO: 1887 - protein, 231 aa, Homo sapiens
MLSSRAEAAMTAADRAIQRFLRTGAAVRYKVMKNWGVIGGIAAALAAGIYVIWGPITERKKRRKGLVPGLVNLGNTCFMNSLLQGLSACPAFIRWLEEFTSQYSRDQKEPPSHQYLSLTLLHLLKALSCQEVTDDEVLDASCLLDVLRMYRWQISSFEEQDAHELFHVITSSLEDERDRQPRVTHLFDVHSLEQQSEITPKQITCRTRGSPHPTSNHWKSQHPFHGRLTSN

SEQ ID NO: 1888 - protein, 255 aa, Homo sapiens
MNKLYIGNLSENAAPSDLESIFKDAKIPVSGPFLVKTGYAFVDCPDESWALKAIEALSGKIELHGKPIEVEHSVPKRQRIRKLQIRNIPPHLQWEVLDSLLVQYGVVESCEQVNTDSETAVVNVTYSSKDQARQALDKLNGFQLENFTLKVAYIPDEMAAQQNPLQQPRGRRGLGQRGSSRQGSPGSVSKQKPCDLPLRLLVPTQFVGAIIGKEGATIRNITKQTQSKIDVHRKENAGAAEKSITILSTPEGTSA

SEQ ID NO: 1889 - protein, 77 aa, Homo sapiens
MEPDSLLDQDDSYESPQERPGSRRSLPGSLSEKSPSMEPSAATPFRVTGFLSRRLKGSIKRTKSQPKLDRNHSFRHI

SEQ ID NO: 1890 - protein, 226 aa, Homo sapiens
MLWKLTDNIKYEDCEDRHDGTSNGTARLPQLGTVGQSPYTSAPPLSHTPNADFQPPYFPPPYQPIYPQSQDPYSHVNDPYSLNPLHAQPQPQHPGWPGQRQSQESGLLHTHRGLPHQLSGLDPRRDYRRHEDLLHGPHALSSGLGDLSIHSLPHAIEEVPHVEDPGINIPDQTVIKKGPVSLSKSNSNAVSAIPINKDNLFGGVVNPNEVFCSVPGRLSLLSSTSK

SEQ ID NO: 1891 - protein, 255 aa, Homo sapiens
MVILQQGDHVWMDLRLGQEFDVPIGAVVKLCDSGQVQVVDDEDNEHWISPQNATHIKPMHPTSVHGVEDMIRLGDLNEAGILRNLLIRYRDHLIYTYTGSILVAVNPYQLLSIYSPEHIRQYTNKKIGEMPPHIFAIADNCYFNMKRNSRDQCCIISGESGAGKTESTKLILQFLAAISGQHSWIEQQVLEATPILEAFGNAKTIRNDNSSRFGKYIDIHFNKRGAIEGAKIEQYLLEKSRVCRQALDERNYHVF

SEQ ID NO: 1892 - protein, 255 aa, Homo sapiens
MGDLSSLTPGGSMGLQVNRGSQSSLEGAPATAPEPHSLGILHASYSVSHRVRPWWDITSCRQQWTRQILKDVSLYVESGQIMCILGSSGSGKTTLLDAMSGRLGRAGTFLGEVYVNGRALRREQFQDCFSYVLQSDTLLSSLTVRETLHYTALLAIRRGNPGSFQKKVEAVMAELSLSHVADRLIGNYSLGGISTGERRRVSIAAQLLQDPKVMLFDEPTTGLDCMTANQIVVLLVELARRNRIVVLTIHQPRSE

SEQ ID NO: 1893 - protein, 255 aa, Homo sapiens
MEPSALRKAGSEQEEGFEGLPRRVTDLGMVSNLRRSNSSLFKSWRLQCPFGNNDKQESLSSWIPENIKKKECVYFVESSKLSDAGKVVCQCGYTHEQHLEEATKPHTFQGTQWDPKKHVQEMPTDAFGDIVFTGLSQKVKKYVRVSQDTPSSVIYHLMTQHWGLDVPNLLISVTGGAKNFNMKPRLKSIFRRGLVKVAQTTGAWIITGGSHTGVMKQVGEAVRDFSLSSSYKEGELITIGVATWGTVHRREGLIH

SEQ ID NO: 1894 - protein, 255 aa, Homo sapiens
MRQVLWLCNVCVTARETRHHLHLPAILDKMPAPGALILLAAVSASGCLASPAHPDGFALGRAPLAPPYAVVLISCSGLLAFIFLLLTCLCCKRGDVGFKEFENPEGEDCSGEYTPPAEETSSSQSLPDVYILPLAEVSLPMPAPQPSHSDMTTPLGLSRQHLSYLQEIGSGWFGKVILGEIFSDYTPAQVVVKELRASAGPLEQRKFISEAQPYRSLQHPNVLQCLGLCVETLPFLLIMEFCQLGDLKRYLRAQR

SEQ ID NO: 1895 - protein, 255 aa, Homo sapiens
MTLPHSLGGAGDPRPPQAMEVHRLEHRQEEEQKEERQHSLRMGSSVRRRTFRSSEEEHEFSAADYALAAALALTASSELSWEAQLRRQTSAVELEERGQKRVGFGNDWERTEIAFLQTHRLLRQRRDWKTLRRRTEEKVQEAKELRELCYGRGPWFWIPLRSHAVWEHTTVLLTCTVQASPPPQVTWYKNDTRIDPRLFRAGKYRITNNYGLLSLEIRRCAIEDSATYTVRVKNAHGQASSFAKVLVRTYLGKDA

SEQ ID NO: 1896 - protein, 255 aa, Homo sapiens
MSTDSNSLAREFLTDVNRLCNAVVQRVEAREEEEEETHMATLGQYLVHGRGFLLLTKLNSIIDQALTCREELLTLLLSLLPLVWKIPVQEEKATDFNLPLSADIILTKEKNSSSQRSTQEKLHLEGSALSSQVSAKVNVFRKSRRQRKITHRYSVRDARKTQLSTSDSEANSDEKGIAMNKHRRPHLLHHFLTSFPKQDHPKAKLDRLATKEQTPPDAMALENSREIIPRQGSNTDILSEPAALSVISNMNNSPF

SEQ ID NO: 1897 - protein, 107 aa, Homo sapiens
MSEFWLISAPGDKENLQALERMNTVTSKSNLSYNTKFAIPDFKVGTLDSLVGLSDELGKLDTFAESLIRRMAQSVVEVMEDSKGKVQEHLLANGVDLTSFVTHFEWD

SEQ ID NO: 1898 - protein, 255 aa, Homo sapiens
MAAAAEPGARAWLGGGSPRPGSPACSPVLGSGGRARPGPGPGPGPERAGVRAPGPAAAPGHSFRKVTLTKPTFCHLCSDFIWGLAGFLCDVCNFMSHEKCLKHVRIPCTSVAPSLVRVPVAHCFGPRGLHKRKFCAVCRKVLEAPALHCEVCELHLHPDCVPFACSDCRQCHQDGHQDHDTHHHHWREGNLPSGARCEVCRKTCGSSDVLAGVRCEWCGVQAHSLCSAALAPECGFGRLRSLVLPPACVRLLPGG

SEQ ID NO: 1899 - protein, 255 aa, Homo sapiens
MGAMAYPLLLCLLLAQLGLGAVGASRDPQGRPDSPRERTPKGKPHAQQPGRASASDSSAPWSRSTDGTILAQKLAEEVPMDVASYLYTGDSHQLKRANCSGRYELAGLPGKWPALASAHPSLHRALDTLTHATNFLNVMLQSNKSREQNLQDDLDWYQALVWSLLEGEPSISRAAITFSTDSLSAPAPQVFLQATREESRILLQDLSSSAPHLANATLETEWFHGLRRKWRPHLHRRGPNQGPRGLGHSWRRKDG

SEQ ID NO: 1900 - protein, 238 aa, Homo sapiens
MSRKASENVEYTLRSLSSLMGERRRKQPEPDAASAAGECSLLAAAESSTSLQSAGAGGGGVGDLERAARRQFQQDETPAFVYVVAVFSALGGFLFGYDTGVVSGAMLLLKRQLSLDALWQELLVSSTVGAAAVSALAGGALNGVFGRRAAILLASALFTAGSAVLAAANNKETLLAGRLVVGLGIGIASMTVPVYIAEVSPPNLRGRLVTINTLFITGGQFFASVVDGAFSYLQKDGW

SEQ ID NO: 1901 - protein, 255 aa, Homo sapiens
MAGYLSPAAYLYVEEQEYLQAYEDVLERYKDERDKVQKKTFTKWINQHLMKVRKHVNDLYEDLRDGHNLISLLEVLSGDTLPREKGRMRFHRLQNVQIALDYLKRRQVKLVNIRNDDITDGNPKLTLGLIWTIILHFQISDIHVTGESEDMSAKERLLLWTQQATEGYAGIRCENFTTCWRDGKLFNAIIHKYRPDLIDMNTVAVQSNLANLEHAFYVAEKIGVIRLLDPEDVDVSSPDEKSVITYVSSLYDAFP

SEQ ID NO: 1902 - protein, 255 aa, Homo sapiens
MSSDEEKYSLPVVQNDSSRGSSVSSNLQEEYEELLHYAIVTPNIEPCASQSSHPKGELVPDVRISTIHDILHSQGNNSEVRETAIEVGKGCDFHISSHSKTDESSPVLSPRKPSHPVMDFFSSHLLADSSSPATNSSHTDAHEILVSDFLVSDENLQKMENVLDLWSSGLKTNIISELSKWRLNFIDWHRMEMRKEKEKHAAHLKQLCNQINELKELQKTFEISIGRKDEVISSLSHAIGKQKEKIELMRTFFHW

SEQ ID NO: 1903 - protein, 132 aa, Homo sapiens
MASEELYEVERIVDKRKNKKGKTEYLVRWKGYDSEDDTWEPEQHLVNCEEYIHDFNRRHTEKQKESTLTRTNRTSPNNARKQISRSTNSNFSKTSPKALVIGKDHESKNSQLFAASQKFRKNTAPSLSSRKN

SEQ ID NO: 1904 - protein, 255 aa, Homo sapiens
MSYYQRPFSPSAYSLPASLNSSIVMQHGTSLDSTDTYPQHAQSLDGTTSSSIPLYRSSEEEKRVTVIKAPHYPGIGPVDESGIPTAIRTTVDRPKDWYKTMFKQIHMVHKPDDDTDMYNTPYTYNAGLYNPPYSAQSHPAAKTQTYRPLSKSHSDNSPNAFKDASSPVPPPHVPPPVPPLRPRDRSSTEKHDWDPPDRKVDTRKFRSEPRSIFEYEPGKSSILQHERPASLYQSSIDRSLERPMSSASMASDFRK

SEQ ID NO: 1905 - protein, 255 aa, Homo sapiens
MAEVGRTGISYPGALLPQGFWAAVEVWLERPQVANKRLCGARLEARWSAALPCAEARGPGTSAGSEQKERGPGPGQGSPGGGPGPRSLSGPEQGTACCELEEAQGQCQQEEAQREAASVPLRDSGHPGHAEGREGDFPAADLDSLWEDFSQSLARGNSELLAFLTSSGAGSQPEAQRELDVVLRTVIPKTSPHCPLTTPRREIVVQDVLNGTITFLPLEEDDEGNLKVKMSNVYQIQLSHSKEEWFISVLIFCPE

SEQ ID NO: 1906 - protein, 142 aa, Homo sapiens
MATQVEPLLPGGATLLQAEEHGGLVRKKPPPAPEGKGEPGPNDVRGGEPDGSARRPRPPCAKPHKEGTGQQERESPRPLQLPGAEGPAISDGEEGGGEPGAGGGAAGAAGAGRRDFVEAPPPKVNPWTKNALPPVLTTVNGQ

SEQ ID NO: 1907 - protein, 39 aa, Homo sapiens
MNTEMYQTPMEVAVYQLHNFSISFFSSLLGGDVVSVKLD

SEQ ID NO: 1908 - protein, 255 aa, Homo sapiens
MDGPTRGHGLRKKRRSRSQRDRERRSRGGLGAGAAGGGGAGRTRALSLASSSGSDKEDNGKPPSSAPSRPRPPRRKRRESTSAEEDIIDGFAMTSFVTFEALEKDVALKPQERVEKRQTPLTKKKREALTNGLSFHSKKSRLSHPHHYSSDRENDRNLCQHLGKRKKMPKALRQLKPGQNSCRDSDSESASGESKGFHRSSSRERLSDSSAPSSLGTGYFCDSDSDQEEKASDASSEKLFNTVIVNKDPELGVGT

SEQ ID NO: 1909 - protein, 255 aa, Homo sapiens
MGATGRLELTLAAPPHPGPAFQRSKARETQGEEEGSEMQIAKSDSIHHMSHSQGQPELPPLPASANEEPSGLYQTVMSHSFYPPLMQRTSWTLAAPFKEQHHHRGPSDSIANNYSLMAQDLKLKDLLKVYQPATISVPRDRTGQGLPSSGNRSSSEPMRKKTKFSSRNKEDSTRIKLAFKTSIFSPMKKEVKTSLTFPGSRPMSPEQQLDVMLQQEMEMESKEKKPSESDLERYYYYLTNGIRKDMIAPEEGEVM

SEQ ID NO: 1910 - protein, 63 aa, Homo sapiens
MKEKSKNAAKTRREKENGEFYELAKLLPLPSAITSQLDKASIIRLTTSYLKMRAVFPEGLGDA

SEQ ID NO: 1911 - protein, 255 aa, Homo sapiens
MFRAGEASKRPLPGPSPPRVRSVEVARGRAGYGFTLSGQAPCVLSCVMRGSPADFVGLRAGDQILAVNEINVKKASHEDVVKLIGKCSGVLHMVIAEGVGRFESCSSDEEGGLYEGKGWLKPKLDSKALGINRAERVVEEMQSGGIFNMIFENPSLCASNSEPLKLKQRSLSESAATRFDVGHESINNPNPNMLSKEEISKVIHDDSVFSIGLESHDDFALDASILNVAMIVGYLGSIELPSTSSNLESDSLQAI

SEQ ID NO: 1912 - protein, 255 aa, Homo sapiens
MPSETPQAEVGPTGCPHRSGPHSAKGSLEKGSPEDKEAKEPLWIRPDAPSRCTWQLGRPASESPHHHTAPAKSPKILPDILKKIGDTPMVRINKIGKKFGLKCELLAKCEFFNAGGSVKDRISLRMIEDAERDGTLKPGDTIIEPTSGNTGIGLALAAAVRGYRCIIVMPEKMSSEKVDVLRALGAEIVRTPTNARFDSPESHVGVAWRLKNEIPNSHILDQYRNASNPLAHYDTTADEILQQCDGKLDMLVASV

SEQ ID NO: 1913 - protein, 43 aa, Homo sapiens
MQDGRKGGAYAGKMEATTAGVGRLEEEALRRKERLKALREKTG

SEQ ID NO: 1914 - protein, 215 aa, Homo sapiens
MSSEQSAPGASPRAPRPGTQKSSGAVTKKGERAAKEKPATVLPPVGEEEPKSPEEYQCSGVLETDFAELCTRWGYTDFPKVVNRPRPHPPFVPSASLSEKATLDDPRLSGSCSLNSLESKYVFFRPTIQVELEQEDSKSVKEIYIRGWKVEERILGVFSKCLPPLTQLQAINLWKVGLTDKTLTTFIELLPLCSSTLRKVSLEGNPLPEQSYHKL

SEQ ID NO: 1915 - protein, 57 aa, Homo sapiens
METNCRKLVSACVQLGVQPAAVECLFSKDSEIKKVEFTDSPESRKEAASSKFFPRQH

SEQ ID NO: 1916 - protein, 255 aa, Homo sapiens
MRTLWMALCALSRLWPGAQAGCAEAGRCCPGRDPACFARGWRLDRVYGTCFCDQACRFTGDCCFDYDRACPARPCFVGEWSPWSGCADQCKPTTRVRRRSVQQEPQNGGAPCPPLEERAGCLEYSTPQGQDCGHTYVPAFITTSAFNKERTRQATSPHWSTHTEDAGYCMEFKTESLTPHCALENWPLTRWMQYLREGYTVCVDCQPPAMNSVSLRCSGDGLDSDGNQTLHWQAIGNPRCQGTWKKVRRVDQCSC

SEQ ID NO: 1917 - protein, 66 aa, Homo sapiens
MDYLTTFTEKSGRLLRGTANRLLGFGGGGEARQVRFEDYLREPAQGDLGCGSPPHRPPAPSSPEGP

SEQ ID NO: 1918 - protein, 62 aa, Homo sapiens
MAAATVGRDTLPEHWSYGVCRDGRVFFINDQLRCTTWLHPRTGEPVNSGHMIRSDLPRGWEE

SEQ ID NO: 1919 - protein, 85 aa, Homo sapiens
MDSAAAAFALDKPALGPGPPPPPPALGPGDCAQARKNFSVSHLLDLEEVAAAGRLAARPGARAEAREGAAREPSGGSSGSEAAPQ

SEQ ID NO: 1920 - protein, 255 aa, Homo sapiens
MSVPDYMQCAEDHQTLLVVVQPVGIVSEENFFRIYKRICSVSQISVRDSQRVLYIRYRHHYPPENNEWGDFQTHRKVVGLITITDCFSAKDWPQTFEKFHVQKEIYGSTLYDSRLFVFGLQGEIVEQPRTDVAFYPNYEDCQTVEKRIEDFIESLFIVLESKRLDRATDKSGDKIPLLCVPFEKKDFVGLDTDSRHYKKRCQGRMRKHVGDLCLQAGMLQDSLVHYHMSVELLRSVNDFLWLGAALEGLCSASVI

SEQ ID NO: 1921 - protein, 255 aa, Homo sapiens
MDHAEENEILAATQRYYVERPIFSHPVLQERLHTKDKVPDSIADKLKQAFTCTPKKIRNIIYMFLPITKWLPAYKFKEYVLGDLVSGISTGVLQLPQGLAFAMLAAVPPIFGLYSSFYPVIMYCFLGTSRHISIGPFAVISLMIGGVAVRLVPDDIVIPGGVNATNGTEARDALRVKVAMSVTLLSGIIQFCLGVCRFGFVAIYLTEPLVRGFTTAAAVHVFTSMLKYLFGVKTKRYSGIFSVVYSTVAVLQNVK

SEQ ID NO: 1922 - protein, 255 aa, Homo sapiens
MHYDGHVRFDLPPQGSVLARNVSTRSCPPRTSPAVDLEEEEEESSVDGKGDRKSTGLKLSKKKARRRHTDDPSKECFTLKFDLNVDIETEIVPAMKKKSLGEVLLPVFERKGIALGKVDIYLDQSNTPLSLTFEAYRFGGHYLRVKAPAKPGDEGKVEQGMKDSKSLSLPILRPAGTGPPALERVDAQSRRESLDILAPGRRRKNMSEFLGEASIPGQEPPTPSSCSLPSGSSGSTNTGDSWKNRAASRFSGFFS

SEQ ID NO: 1923 - protein, 205 aa, Homo sapiens
MAHAGRTGYDNREIVMKYIHYKLSQRGYEWDAGDVGAAPPGAAPAPGIFSSQPGHTPHPAASRDPVARTSPLQTPAAPGAAAGPALSPVPPVVHLTLRQAGDDFSRRYRRDFAEMSSQLHLTPFTARGRFATVVEELFRDGVNWGRIVAFFEFGGVMCVESVNREMSPLVDNIALWMTEYLNRHLHTWIQDNGGWDAFVELYGPS

SEQ ID NO: 1924 - protein, 77 aa, Homo sapiens
MKRGTSLHSRRGKPEAPKGSPQINRKSGQEMTAVMQSGRPRSSSTTDAPTSSAMMEIACAAAAAAAACLPGEEGTAE

SEQ ID NO: 1925 - protein, 255 aa, Homo sapiens
MTSTGKDGGAQHAQYVGPYRLEKTLGKGQTGLVKLGVHCVTCQKVAIKIVNREKLSESVLMKVEREIAILKLIEHPHVLKLHDVYENKKYLYLVLEHVSGGELFDYLVKKGRLTPKEARKFFRQIISALDFCHSHSICHRDLKPENLLLDEKNNIRIADFGMASLQVGDSLLETSCGSPHYACPEVIRGEKYDGRKADVWSCGVILFALLVGALPFDDDNLRQLLEKVKRGVFHMPHFIPPDCQSLLRGMIEVDA

SEQ ID NO: 1926 - protein, 255 aa, Homo sapiens
MMCEVMPTISEDGRRGSALGPDEAGGELERLMVTMLTERERLLETLREAQDGLATAQLRLRELGHEKDSLQRQLSIALPQEFAALTKELNLCREQLLEREEEIAELKAERNNTRLLLEHLECLVSRHERSLRMTVVKRQAQSPGGVSSEVEVLKALKSLFEHHKALDEKVRERLRMALERVAVLEEELELSNQETLNLREQLSRRRSGLEEPGKDGDGQTLANGLGPGGDSNRRTAELEEALERQRAEVCQLRER

SEQ ID NO: 1927 - protein, 255 aa, Homo sapiens
MPPPRLLFFLLFLTPMEVRPEEPLVVKVEEGDNAVLQCLKGTSDGPTQQLTWSRESPLKPFLKLSLGLPGLGIHMRPLAIWLFIFNVSQQMGGFYLCQPGPPSEKAWQPGWTVNVEGSGELFRWNVSDLGGLGCGLKNRSSEGPSSPSGKLMSPKLYVWAKDRPEIWEGEPPCLPPRDSLNQSLSQDLTMAPGSTLWLSCGVPPDSVSRGPLSWTHVHPKGPKSLLSLELKDDRPARDMWVMETGLLLPRATAQD

SEQ ID NO: 1928 - protein, 174 aa, Homo sapiens
MVAGMLMPRDQLRAIYEVLFREGVMVAKKDRRPRSLHPHVPGVTNLQVMRAMASLRARGLVRETFAWCHFYWYLTNEGIAHLRQYLHLPPEIVPASLQRVRRPVAMVMPARRTPHVQAVQGPLGSPPKRGPLPTEEQRVYRRKELEEVSPETPVVPATTQRTLARPGPEPAPAT

SEQ ID NO: 1929 - protein, 255 aa, Homo sapiens
MGNGVKEGPVRLHEDAEAVLSSSVSSKRDHRQVLSSLLSGALAGALAKTAVAPLDRTKIIFQVSSKRFSAKEAFRVLYYTYLNEGFLSLWRGNSATMVRVVPYAAIQFSAHEEYKRILGSYYGFRGEALPPWPRLFAGALAGTTAASLTYPLDLVRARMAVTPKEMYSNIFHVFIRISREEGLKTLYHGFMPTVLGVIPYAGLSFFTYETLKSLHREYSGRRQPYPFERMIFGACAGLIGQSASYPLDVVRRRMQ

SEQ ID NO: 1930 - protein, 87 aa, Homo sapiens
MAGGGSDLSTRGLNGGVSQVANEMNHLPAHSQSLQRLFTEDQDVDEGLVYDTVFKHFKRHKLEISNAIKKTFPFLEGLRDRELITNK

SEQ ID NO: 1931 - protein, 255 aa, Homo sapiens
MERRRLWGSIQSRYISMSVWTSPRRLVELAGQSLLKDEALAIAALELLPRELFPPLFMAAFDGRHSQTLKAMVQAWPFTCLPLGVLMKGQHLHLETFKAVLDGLDVLLAQEVRPRRWKLQVLDLRKNSHQDFWTVWSGNRASLYSFPEPEAAQPMTKKRKVDGLSTEAEQPFIPVEVLVDLFLKEGACDELFSYLIEKVKRKKNVLRLCCKKLKIFAMPMQDIKMILKMVQLDSIEDLEVTCTWKLPTLAKFSPY

SEQ ID NO: 1932 - protein, 255 aa, Homo sapiens
MAVEDEGLRVFQSVKIKIGEAKNLPSYPGPSKMRDCYCTVNLDQEEVFRTKIVEKSLCPFYGEDFYCEIPRSFRHLSFYIFDRDVFRRDSIIGKVAIQKEDLQKYHNRDTWFQLQHVDADSEVQGKVHLELRLSEVITDTGVVCHKLATRIVECQGLPIVNGQCDPYATVTLAGPFRSEAKKTKVKRKTNNPQFDEVFYFEVTRPCSYSKKSHFDFEEEDVDKLEIRVDLWNASNLKFGDEFLGELRIPLKVLRQ

SEQ ID NO: 1933 - protein, 255 aa, Homo sapiens
MPAVSKGDGMRGLAVFISDIRNCKSKEAEIKRINKELANIRSKFKGDKALDGYSKKKYVCKLLFIFLLGHDIDFGHMEAVNLLSSNKYTEKQIGYLFISVLVNSNSELIRLINNAIKNDLASRNPTFMCLALHCIANVGSREMGEAFAADIPRILVAGDSMDSVKQSAALCLLRLYKASPDLVPMGEWTARVVHLLNDQHMGVVTAAVSLITCLCKKNPDDFKTCVSLAVSRLSRIVSSASTDLQDYTYYFVPAP

SEQ ID NO: 1934 - protein, 255 aa, Homo sapiens
MAGALRRGRALGSRPSGPTVSSRRSPQCPVAQEGLGARSRPRVAPRSLARCGPSSRLMGWKPSEARGQSQSFQASGLQPRSLKAARRATGRPDRSRAAPPNMDPDPQAGVQVGMRVVRGVDWKWGQQDGGEGGVGTVVELGRHGSPSTPDRTVVVQWDQGTRTNYRAGYQGAHDLLLYDNAQIGVRHPNIICDCCKKHGLRGMRWKCRVCLDYDLCTQCYMHNKHELAHAFDRYETAHSRPVTLSPRQGLPRIPL

SEQ ID NO: 1935 - protein, 255 aa, Homo sapiens
MAGGVWGRSRAREAPVGALTLTALTEGIRARQGQPQGPPSAGPQPKSWEVKPEAEPQTQALTAPSEAEPGRGATVPEAGSEPCSLNSALEPAPEGPHQVPQSSWEEGVLADLALYTAACLEEAGFAGTQATVLTLSSALEARGERLEDQVHALVRGLLAQVPSLAEGRPWRAALRVLSALALEHARDVVCALLPRSLPADRVAAELWRSLSRNQRVNGQVLVQLLWALKGASGPEPQALAATRALGEMLAVSGCV

SEQ ID NO: 1936 - protein, 255 aa, Homo sapiens
MLVIWILTLALRLCASVTTVTPGSTVNTSIGGNTTSASTPSSSDPFTTFSDYGVSVTFITGSTATKHFLDSSTNSGHSEESTVSHSGPGATGTTLFPSHSATSVFVGEPKTSPITSASMETTALPGSTTTAGLSEKSTTFYSSPRSPDRTLSPARTTSSGVSEKSTTSHSRPGPTHTIAFPDSTTMPGVSQESTASHSIPGSTDTTLSPGTTTPSSLGPESTTFHSSPGYTKTTRLPDNTTTSGLLEASTPVHSS

SEQ ID NO: 1937 - protein, 255 aa, Homo sapiens
MESRAEGGSPAVFDWFFEAACPASLQEDPPILRQFPPDFRDQEAMQMVPKFCFPFDVEREPPSPAVQHFTFALTDLAGNRRFGFCRLRAGTQSCLCILSHLPWFEVFYKLLNTVGDLLAQDQVTEAEELLQNLFQQSLSGPQASVGLELGSGVTVSSGQGIPPPTRGNSKPLSCFVAPDSGRLPSIPENRNLTELVVAVTDENIVGLFAALLAERRVLLTASKLSTLTSCVHASCALLYPMRWEHVLIPTLPPHL

SEQ ID NO: 1938 - protein, 255 aa, Homo sapiens
MSALRPLLLLLLPLCPGPGPGPGSEAKVTRSCAETRQVLGARGYSLNLIPPALISGEHLRVCPQEYTCCSSETEQRLIRETEATFRGLVEDSGSFLVHTLAARHRKFDEFFLEMLSVAQHSLTQLFSHSYGRLYAQHALIFNGLFSRLRDFYGESGEGLDDTLADFWAQLLERVFPLLHPQYSFPPDYLLCLSRLASSTDGSLQPFGDSPRRLRLQITRTLVAARAFVQGLETGRNVVSEALKVPVSEGCSQALM

SEQ ID NO: 1939 - protein, 255 aa, Homo sapiens
MNGVAFCLVGIPPRPEPRPPQLPLGPRDGCSPRRPFPWQGPRTLLLYKSPQDGFGFTLRHFIVYPPESAVHCSLKEEENGGRGGGPSPRYRLEPMDTIFVKNVKEDGPAHRAGLRTGDRLVKVNGESVIGKTYSQVIALIQNSDDTLELSIMPKDEDILQLAYSQDAYLKGNEPYSGEARSIPEPPPICYPRKTYAPPARASTRATMVPEPTSALPSDPRSPAAWSDPGLRVPPAARAHLDNSSLGMSQPRPSPG

SEQ ID NO: 1940 - protein, 75 aa, Homo sapiens
MFRAALEDSVEKKSSLKETETTSKGTSKYDRERETEMKTVMGMKMHFWVRTPASGRGRGGSDHARSRAAPLPLLA

SEQ ID NO: 1941 - protein, 167 aa, Homo sapiens
MDRGRPAGSPLSASAEPAPLAAAIRDSRPGRTGPGPAGPGGGSRSGSGRPAAANAARERSRVQTLRHAFLELQRTLPSVPPDTKLSKLDVLLLATTYIAHLTRSLQDDAEAPADAGLGALRGDGYLHPVKKWPMRSRLYIGATGQFLKHSVSGEKTNHDNTPTDSQP

SEQ ID NO: 1942 - protein, 15 aa, Homo sapiens
MAEKLQEANFLLEDI

SEQ ID NO: 1943 - protein, 15 aa, Homo sapiens
QYSHIADKVSEVPAN

SEQ ID NO: 1944 - protein, 15 aa, Homo sapiens
FLKKSSAVTVFKLRR

SEQ ID NO: 1945 - protein, 15 aa, Homo sapiens
PKLKYIPLKFSFTAA

SEQ ID NO: 1946 - protein, 15 aa, Homo sapiens
EHLHTVNPMMLRLKE

SEQ ID NO: 1947 - protein, 15 aa, Homo sapiens
VSDFLIQTFKVFQKN

SEQ ID NO: 1948 - protein, 15 aa, Homo sapiens
DNTAEQNIAAFLKEN

SEQ ID NO: 1949 - protein, 15 aa, Homo sapiens
VNPMMLRLKELWFAE

SEQ ID NO: 1950 - protein, 15 aa, Homo sapiens
KTSLTFPGSRPMSPE

SEQ ID NO: 1951 - protein, 15 aa, Homo sapiens
IEEYFASVASFMSLQ

SEQ ID NO: 1952 - protein, 15 aa, Homo sapiens
NEIASMNITVPLAMF

SEQ ID NO: 1953 - protein, 15 aa, Homo sapiens
NPKLTLGLIWTIILH

SEQ ID NO: 1954 - protein, 15 aa, Homo sapiens
FTKWINQHLMKVRKH

SEQ ID NO: 1955 - protein, 15 aa, Homo sapiens
ERDKVQKKTFTKWIN

SEQ ID NO: 1956 - protein, 15 aa, Homo sapiens
ISLLEVLSGDTLPRE

SEQ ID NO: 1957 - protein, 15 aa, Homo sapiens
MAGYLSPAAYLYVEE

SEQ ID NO: 1958 - protein, 14 aa, Homo sapiens
MAGYLSPAAYLYVE

SEQ ID NO: 1959 - protein, 15 aa, Homo sapiens
ADVSQYPVNHLVTFC

SEQ ID NO: 1960 - protein, 15 aa, Homo sapiens
EVDILNHVFDDVESF

SEQ ID NO: 1961 - protein, 15 aa, Homo sapiens
MSTATGPEAAPKPSA

SEQ ID NO: 1962 - protein, 15 aa, Homo sapiens
AQPDVHFFQGLRLGA

SEQ ID NO: 1963 - protein, 15 aa, Homo sapiens
ILNHVFDDVESFVSR

SEQ ID NO: 1964 - protein, 15 aa, Homo sapiens
VSQYPVNHLVTFCLG

SEQ ID NO: 1965 - protein, 15 aa, Homo sapiens
PASKEELESYPLGAI

SEQ ID NO: 1966 - protein, 15 aa, Homo sapiens
EPERAQPDVHFFQGL

SEQ ID NO: 1967 - protein, 15 aa, Homo sapiens
VEDLLFSGSRFVWNL

SEQ ID NO: 1968 - protein, 15 aa, Homo sapiens
LLDLVASHFNLKEKE

SEQ ID NO: 1969 - protein, 15 aa, Homo sapiens
TVSTLRRWYTERLRA

SEQ ID NO: 1970 - protein, 15 aa, Homo sapiens
QIEVESETIFKLAAF

SEQ ID NO: 1971 - protein, 15 aa, Homo sapiens
VWNLTVSTLRRWYTE

SEQ ID NO: 1972 - protein, 15 aa, Homo sapiens
AVRFYIESISFLKDK

SEQ ID NO: 1973 - protein, 15 aa, Homo sapiens
AEGVLLDYLVLLPRD

SEQ ID NO: 1974 - protein, 15 aa, Homo sapiens
SRIAMYELLADADIQ

SEQ ID NO: 1975 - protein, 15 aa, Homo sapiens
RTNTLLGHLISKAQR

SEQ ID NO: 1976 - protein, 15 aa, Homo sapiens
VIHFYQAAHPTFPAQ

SEQ ID NO: 1977 - protein, 15 aa, Homo sapiens
TKATNIRLRFLRTNT

SEQ ID NO: 1978 - protein, 15 aa, Homo sapiens
YAQMTSVQNDVRITL

SEQ ID NO: 1979 - protein, 15 aa, Homo sapiens
CLLYQHLPVTRFPCT

SEQ ID NO: 1980 - protein, 15 aa, Homo sapiens
DKVSSYGGYLTYQAK

SEQ ID NO: 1981 - protein, 15 aa, Homo sapiens
LSGREVELHLRLRIP

SEQ ID NO: 1982 - protein, 15 aa, Homo sapiens
LHKKSMDKSLEFITN

SEQ ID NO: 1983 - protein, 15 aa, Homo sapiens
DGYFALEKSNYFGCQ

SEQ ID NO: 1984 - protein, 15 aa, Homo sapiens
ENNYYFPDLHHMKYE

SEQ ID NO: 1985 - protein, 15 aa, Homo sapiens
ILRYVNPGTEAVSGH

SEQ ID NO: 1986 - protein, 15 aa, Homo sapiens
ADPFSITPGIWVACI

SEQ ID NO: 1987 - protein, 15 aa, Homo sapiens
QNVILHEHHIFLGAT

SEQ ID NO: 1988 - protein, 15 aa, Homo sapiens
CKEALAKSEMNVNMK

SEQ ID NO: 1989 - protein, 15 aa, Homo sapiens
MDRSAMCAFPIKYVN

SEQ ID NO: 1990 - protein, 15 aa, Homo sapiens
TDQSYIDVLPEFRDS

SEQ ID NO: 1991 - protein, 15 aa, Homo sapiens
LDAQTFHTRIIRFCS

SEQ ID NO: 1992 - protein, 15 aa, Homo sapiens
SNNFIYFLTVQRETL

SEQ ID NO: 1993 - protein, 15 aa, Homo sapiens
KDGFMFLTDQSYIDV

SEQ ID NO: 1994 - protein, 15 aa, Homo sapiens
RDSYPIKYVHAFESN

SEQ ID NO: 1995 - protein, 15 aa, Homo sapiens
QKVAEYKTGPVLEHP

SEQ ID NO: 1996 - protein, 15 aa, Homo sapiens
CSSKANLSGGVWKDN

SEQ ID NO: 1997 - protein, 15 aa, Homo sapiens
RDEYRTEFTTALQRV

SEQ ID NO: 1998 - protein, 15 aa, Homo sapiens
TINSSYFPDHPLHSI

SEQ ID NO: 1999 - protein, 15 aa, Homo sapiens
PMDRSAMCAFPIKYV

SEQ ID NO: 2000 - protein, 15 aa, Homo sapiens
GASGIVEVLTEVPNI

SEQ ID NO: 2001 - protein, 15 aa, Homo sapiens
QGFTLLHHASLKGHA

SEQ ID NO: 2002 - protein, 15 aa, Homo sapiens
ENKSSLSVALDKLRA

SEQ ID NO: 2003 - protein, 15 aa, Homo sapiens
QVAAYLGQVELIRLL

SEQ ID NO: 2004 - protein, 15 aa, Homo sapiens
TALHLAALNNHREVA

SEQ ID NO: 2005 - protein, 15 aa, Homo sapiens
CVGEAAGGFYYKDHL

SEQ ID NO: 2006 - protein, 15 aa, Homo sapiens
LQRRVSADSQPFQHG

SEQ ID NO: 2007 - protein, 15 aa, Homo sapiens
GNLRVAVAGQRWTFS

SEQ ID NO: 2008 - protein, 15 aa, Homo sapiens
EDGFTALHLAALNNH

SEQ ID NO: 2009 - protein, 15 aa, Homo sapiens
GGFYYKDHLPRLGKP

SEQ ID NO: 2010 - protein, 15 aa, Homo sapiens
DSCYQFNFQSTLSWR

SEQ ID NO: 2011 - protein, 15 aa, Homo sapiens
TDGSIINFISWAPGK

SEQ ID NO: 2012 - protein, 15 aa, Homo sapiens
RDCSIALPYVCKKKP

SEQ ID NO: 2013 - protein, 15 aa, Homo sapiens
EWLRFQEAEYKFFEH

SEQ ID NO: 2014 - protein, 15 aa, Homo sapiens
SGDEVMYTHWNRDQP

SEQ ID NO: 2015 - protein, 15 aa, Homo sapiens
RFEQAFVSSLIYNWE

SEQ ID NO: 2016 - protein, 15 aa, Homo sapiens
GWTWHSPSCYWLGED

SEQ ID NO: 2017 - protein, 15 aa, Homo sapiens
TNRFEQAFVSSLIYN

SEQ ID NO: 2018 - protein, 15 aa, Homo sapiens
QGRREWLRFQEAEYK

SEQ ID NO: 2019 - protein, 15 aa, Homo sapiens
LCALPYHEVYTIQGN

SEQ ID NO: 2020 - protein, 15 aa, Homo sapiens
CPIKSNDCETFWDKD

SEQ ID NO: 2021 - protein, 15 aa, Homo sapiens
GGCVALATGSAMGLW

SEQ ID NO: 2022 - protein, 15 aa, Homo sapiens
EGEYFWTALQDLNST

SEQ ID NO: 2023 - protein, 15 aa, Homo sapiens
PDELLPQAIEFVNQY

SEQ ID NO: 2024 - protein, 15 aa, Homo sapiens
SKSCLGSIMTPKSLT

SEQ ID NO: 2025 - protein, 15 aa, Homo sapiens
VKLDATPLSSPRHVR

SEQ ID NO: 2026 - protein, 15 aa, Homo sapiens
IGRIQWSNLQVFDAR

SEQ ID NO: 2027 - protein, 15 aa, Homo sapiens
AIEFVNQYYGSFKEA

SEQ ID NO: 2028 - protein, 15 aa, Homo sapiens
TKEIETTGTYQLTGD

SEQ ID NO: 2029 - protein, 12 aa, Homo sapiens
MACPWKFLFKTK

SEQ ID NO: 2030 - protein, 15 aa, Homo sapiens
RPRSLHPHVPGVTNL

SEQ ID NO: 2031 - protein, 12 aa, Homo sapiens
MVAGMLMPRDQL

SEQ ID NO: 2032 - protein, 15 aa, Homo sapiens
HLRQYLHLPPEIVPA

SEQ ID NO: 2033 - protein, 15 aa, Homo sapiens
RETFAWCHFYWYLTN

SEQ ID NO: 2034 - protein, 15 aa, Homo sapiens
KKKSLGEVLLPVFER

SEQ ID NO: 2035 - protein, 15 aa, Homo sapiens
LWASVMAPVLEKARR

SEQ ID NO: 2036 - protein, 15 aa, Homo sapiens
LHTEASYIRKLRVII

SEQ ID NO: 2037 - protein, 15 aa, Homo sapiens
SLGEVLLPVFERKGI

SEQ ID NO: 2038 - protein, 15 aa, Homo sapiens
WKNRAASRFSGFFSS

SEQ ID NO: 2039 - protein, 15 aa, Homo sapiens
KNMSEFLGEASIPGQ

SEQ ID NO: 2040 - protein, 15 aa, Homo sapiens
GSSGSTNTGDSWKNR

SEQ ID NO: 2041 - protein, 15 aa, Homo sapiens
TFEAYRFGGHYLRVK

SEQ ID NO: 2042 - protein, 15 aa, Homo sapiens
THHTLWMGLALLGVL

SEQ ID NO: 2043 - protein, 15 aa, Homo sapiens
HTLWMGLALLGVLGD

SEQ ID NO: 2044 - protein, 15 aa, Homo sapiens
APEAQVSVQPNFQQD

SEQ ID NO: 2045 - protein, 12 aa, Homo sapiens
MATHHTLWMGLA

SEQ ID NO: 2046 - protein, 15 aa, Homo sapiens
GPSKMRDCYCTVNLD

SEQ ID NO: 2047 - protein, 15 aa, Homo sapiens
EIPRSFRHLSFYIFD

SEQ ID NO: 2048 - protein, 15 aa, Homo sapiens
RYTAVSSFIFLRFFA

SEQ ID NO: 2049 - protein, 15 aa, Homo sapiens
FKESYMATFYEFFNE

SEQ ID NO: 2050 - protein, 15 aa, Homo sapiens
LSFYIFDRDVFRRDS

SEQ ID NO: 2051 - protein, 15 aa, Homo sapiens
KESYMATFYEFFNEQ

SEQ ID NO: 2052 - protein, 15 aa, Homo sapiens
DADSEVQGKVHLELR

SEQ ID NO: 2053 - protein, 15 aa, Homo sapiens
DVRYTAVSSFIFLRF

SEQ ID NO: 2054 - protein, 15 aa, Homo sapiens
DHVFSSDYYSPLRDL

SEQ ID NO: 2055 - protein, 15 aa, Homo sapiens
GEDFYCEIPRSFRHL

SEQ ID NO: 2056 - protein, 15 aa, Homo sapiens
SSDYYSPLRDLLLKS

SEQ ID NO: 2057 - protein, 15 aa, Homo sapiens
HSKLQMHHVAQVLRE

SEQ ID NO: 2058 - protein, 15 aa, Homo sapiens
RLKSIFRRGLVKVAQ

SEQ ID NO: 2059 - protein, 15 aa, Homo sapiens
HPTMTAALISNKPEF

SEQ ID NO: 2060 - protein, 15 aa, Homo sapiens
LLGDFTQPLYPRPRH

SEQ ID NO: 2061 - protein, 15 aa, Homo sapiens
ECGLMKKAALYFSDF

SEQ ID NO: 2062 - protein, 15 aa, Homo sapiens
VQLKEFVTWDTLLYL

SEQ ID NO: 2063 - protein, 15 aa, Homo sapiens
MKKAALYFSDFWNKL

SEQ ID NO: 2064 - protein, 15 aa, Homo sapiens
HVTFTMDPIRDLLIW

SEQ ID NO: 2065 - protein, 15 aa, Homo sapiens
AALYFSDFWNKLDVG

SEQ ID NO: 2066 - protein, 15 aa, Homo sapiens
SAAVLNDYSLTKSHE

SEQ ID NO: 2067 - protein, 15 aa, Homo sapiens
LERHVVSFDSSRPTS

SEQ ID NO: 2068 - protein, 15 aa, Homo sapiens
LNDYSLTKSHEMENV
